United States Patent Application Publication US 2007/0009899 A1 - sequence listing, part 9

SEQ ID NO: 206256 - DNA, 25 bp, Canis familiaris
ttctcaaacctgaaggacctgcctc

SEQ ID NO: 206257 - DNA, 25 bp, Canis familiaris
ttccaacagccaaggctacctgcta

SEQ ID NO: 206258 - DNA, 25 bp, Canis familiaris
ttcttccatgccaagtgctttttac

SEQ ID NO: 206259 - DNA, 25 bp, Canis familiaris
ttcttccatcctttgctttcatgga

SEQ ID NO: 206260 - DNA, 25 bp, Canis familiaris
ttcttccagctgctgttcttgcagg

SEQ ID NO: 206261 - DNA, 25 bp, Canis familiaris
ttctgtgctatgaggatgctttggg

SEQ ID NO: 206262 - DNA, 25 bp, Canis familiaris
ttgcgttttcatcagctttggggga

SEQ ID NO: 206263 - DNA, 25 bp, Canis familiaris
ttctgtaacttgcccttgtggggga

SEQ ID NO: 206264 - DNA, 25 bp, Canis familiaris
ttcgatttcttcggtaggggcaaag

SEQ ID NO: 206265 - DNA, 25 bp, Canis familiaris
ttctgtttcttcgattcattcgtgc

SEQ ID NO: 206266 - DNA, 25 bp, Canis familiaris
ttctgttttgctttctcattcgtat

SEQ ID NO: 206267 - DNA, 25 bp, Canis familiaris
ttctgtgatcttctttccttgttaa

SEQ ID NO: 206268 - DNA, 25 bp, Canis familiaris
ttccgatgctttttgtccggggaga

SEQ ID NO: 206269 - DNA, 25 bp, Canis familiaris
ttcctcctctgtaaaacggggacag

SEQ ID NO: 206270 - DNA, 25 bp, Canis familiaris
ttgcctatgcttctaacaaggggaa

SEQ ID NO: 206271 - DNA, 25 bp, Canis familiaris
ttctcttgtgctcattacagaagcg

SEQ ID NO: 206272 - DNA, 25 bp, Canis familiaris
ttctctgttgctcattttaccagaa

SEQ ID NO: 206273 - DNA, 25 bp, Canis familiaris
ttctctttctcctcttaacaaatac

SEQ ID NO: 206274 - DNA, 25 bp, Canis familiaris
ttcttttgctccagtgttacaggaa

SEQ ID NO: 206275 - DNA, 25 bp, Canis familiaris
ttcttttctccacttctttggggag

SEQ ID NO: 206276 - DNA, 25 bp, Canis familiaris
ttcttcttcctccatttctgaggga

SEQ ID NO: 206277 - DNA, 25 bp, Canis familiaris
ttctgttcttcccagttaagatgaa

SEQ ID NO: 206278 - DNA, 25 bp, Canis familiaris
ttctttcagctctcatgtccaaaaa

SEQ ID NO: 206279 - DNA, 25 bp, Canis familiaris
ttctttagctcaggatggcatataa

SEQ ID NO: 206280 - DNA, 25 bp, Canis familiaris
ttcttcttgtcagggtcatgcacga

SEQ ID NO: 206281 - DNA, 25 bp, Canis familiaris
ttctttctgctgggttgctcacaga

SEQ ID NO: 206282 - DNA, 25 bp, Canis familiaris
ttctatcctctgtgtgtgtcggaac

SEQ ID NO: 206283 - DNA, 25 bp, Canis familiaris
ttcttctctgattcactgttctgga

SEQ ID NO: 206284 - DNA, 25 bp, Canis familiaris
ttctatcagagatcctgttagagat

SEQ ID NO: 206285 - DNA, 25 bp, Canis familiaris
ttcttcacgatggcccttggcattt

SEQ ID NO: 206286 - DNA, 25 bp, Canis familiaris
ttcttcatcatctccctggtgatgc

SEQ ID NO: 206287 - DNA, 25 bp, Canis familiaris
ttctttctttgcgagctgagttgga

SEQ ID NO: 206288 - DNA, 25 bp, Canis familiaris
ttcttcccactgaaggcagcttgaa

SEQ ID NO: 206289 - DNA, 25 bp, Canis familiaris
ttctccctgacggaggcccatgaaa

SEQ ID NO: 206290 - DNA, 25 bp, Canis familiaris
ttcttccagaatccaaccctgagaa

SEQ ID NO: 206291 - DNA, 25 bp, Canis familiaris
ttcttctcagaaacaatccttgcta

SEQ ID NO: 206292 - DNA, 25 bp, Canis familiaris
ttcttcagcaaagcctcatctaata

SEQ ID NO: 206293 - DNA, 25 bp, Canis familiaris
ttctacaggcgagtgacatttcaaa

SEQ ID NO: 206294 - DNA, 25 bp, Canis familiaris
ttctcacaggcattgctggacccga

SEQ ID NO: 206295 - DNA, 25 bp, Canis familiaris
ttctcagagcttcgggagtccgaag

SEQ ID NO: 206296 - DNA, 25 bp, Canis familiaris
ttctcagactatctggactgccaat

SEQ ID NO: 206297 - DNA, 25 bp, Canis familiaris
ttctcagagcttcgtgactcgcgat

SEQ ID NO: 206298 - DNA, 25 bp, Canis familiaris
ttctcaactgtcccctgcatgggga

SEQ ID NO: 206299 - DNA, 25 bp, Canis familiaris
ttctctacttaggcacttgggatgt

SEQ ID NO: 206300 - DNA, 25 bp, Canis familiaris
ttctcttcctgagcactctggagaa

SEQ ID NO: 206301 - DNA, 25 bp, Canis familiaris
ttctgcattcccaccagcagtagac

SEQ ID NO: 206302 - DNA, 25 bp, Canis familiaris
ttctacccctgtgctgtgtgagagc

SEQ ID NO: 206303 - DNA, 25 bp, Canis familiaris
ttctacctcctttcagcacatagag

SEQ ID NO: 206304 - DNA, 25 bp, Canis familiaris
ttctaactcctcccatatcataaga

SEQ ID NO: 206305 - DNA, 25 bp, Canis familiaris
ttctaacctctcctattataccaga

SEQ ID NO: 206306 - DNA, 25 bp, Canis familiaris
ttctaagtgctctttttctcaccaa

SEQ ID NO: 206307 - DNA, 25 bp, Canis familiaris
ttctaaggagccatcattccaccca

SEQ ID NO: 206308 - DNA, 25 bp, Canis familiaris
ttctaagataccaataagccacaaa

SEQ ID NO: 206309 - DNA, 25 bp, Canis familiaris
ttccataaactctaacaccacaact

SEQ ID NO: 206310 - DNA, 25 bp, Canis familiaris
ttccacaaacctatccctgggttat

SEQ ID NO: 206311 - DNA, 25 bp, Canis familiaris
ttccaaacccttgggcactggtaat

SEQ ID NO: 206312 - DNA, 25 bp, Canis familiaris
ttcctaacccaagggctcttgtggt

SEQ ID NO: 206313 - DNA, 25 bp, Canis familiaris
ttcttcaaccagcagggcacatctt

SEQ ID NO: 206314 - DNA, 25 bp, Canis familiaris
ttctgccaaaatcaagctgaacttt

SEQ ID NO: 206315 - DNA, 25 bp, Canis familiaris
ttctgcccagatcaagtgtgtattt

SEQ ID NO: 206316 - DNA, 25 bp, Canis familiaris
ttctcccagcataaaaggtcttttg

SEQ ID NO: 206317 - DNA, 25 bp, Canis familiaris
ttctacctctagtaatgggctttat

SEQ ID NO: 206318 - DNA, 25 bp, Canis familiaris
ttctttgcctaggatacggttttat

SEQ ID NO: 206319 - DNA, 25 bp, Canis familiaris
ttctttcctctgacttgggttttgt

SEQ ID NO: 206320 - DNA, 25 bp, Canis familiaris
ttctttggtttgtatgtggtttctc

SEQ ID NO: 206321 - DNA, 25 bp, Canis familiaris
ttcgtaggtagtttgtcttctttca

SEQ ID NO: 206322 - DNA, 25 bp, Canis familiaris
ttcgttcgtagtgtgtcttgcgtgc

SEQ ID NO: 206323 - DNA, 25 bp, Canis familiaris
ttcggggttgtcattgttggatgcc

SEQ ID NO: 206324 - DNA, 25 bp, Canis familiaris
ttcccggcttgcttgttgttgccgg

SEQ ID NO: 206325 - DNA, 25 bp, Canis familiaris
ttgcccaggctacttttgaagcgat

SEQ ID NO: 206326 - DNA, 25 bp, Canis familiaris
ttggccgttccaatttgaagacttc

SEQ ID NO: 206327 - DNA, 25 bp, Canis familiaris
ttggacacttccattgttatgcctc

SEQ ID NO: 206328 - DNA, 25 bp, Canis familiaris
ttggcactttccatggcaggtactc

SEQ ID NO: 206329 - DNA, 25 bp, Canis familiaris
ttggatttctaccttcagccatagc

SEQ ID NO: 206330 - DNA, 25 bp, Canis familiaris
ttctattctgtaccattagcctagt

SEQ ID NO: 206331 - DNA, 25 bp, Canis familiaris
ttctgttctatacactcgcctacag

SEQ ID NO: 206332 - DNA, 25 bp, Canis familiaris
ttgttgtcttcacagtacctatact

SEQ ID NO: 206333 - DNA, 25 bp, Canis familiaris
ttctgttttacatgtgaacttccat

SEQ ID NO: 206334 - DNA, 25 bp, Canis familiaris
ttctgtctttaaaggtactggccat

SEQ ID NO: 206335 - DNA, 25 bp, Canis familiaris
ttctttttaattcttcttcctctga

SEQ ID NO: 206336 - DNA, 25 bp, Canis familiaris
ttctttttttcttgttttgtctgtg

SEQ ID NO: 206337 - DNA, 25 bp, Canis familiaris
ttcttctatgttattccttttctgg

SEQ ID NO: 206338 - DNA, 25 bp, Canis familiaris
ttcgtttttattctcctactctgag

SEQ ID NO: 206339 - DNA, 25 bp, Canis familiaris
ttcttttaattgtttcctaccatga

SEQ ID NO: 206340 - DNA, 25 bp, Canis familiaris
ttcttttaatgcttttactgcccag

SEQ ID NO: 206341 - DNA, 25 bp, Canis familiaris
ttcttatcttatttatcttctccca

SEQ ID NO: 206342 - DNA, 25 bp, Canis familiaris
ttctttccatatgttatttccaata

SEQ ID NO: 206343 - DNA, 25 bp, Canis familiaris
ttcttaggtaacatattcatccatt

SEQ ID NO: 206344 - DNA, 25 bp, Canis familiaris
ttcttatttagaattttcatcacta

SEQ ID NO: 206345 - DNA, 25 bp, Canis familiaris
ttctaatttaattttatatcctatt

SEQ ID NO: 206346 - DNA, 25 bp, Canis familiaris
ttcttttctttatttattctctgta

SEQ ID NO: 206347 - DNA, 25 bp, Canis familiaris
ttctttctctttttattcttctata

SEQ ID NO: 206348 - DNA, 25 bp, Canis familiaris
ttcttttctgttttttcttcttcat

SEQ ID NO: 206349 - DNA, 25 bp, Canis familiaris
ttctttttgcttttctgtgttttct

SEQ ID NO: 206350 - DNA, 25 bp, Canis familiaris
ttctgtagttttttgctgtttccct

SEQ ID NO: 206351 - DNA, 25 bp, Canis familiaris
ttcccagtttactctgttctaatct

SEQ ID NO: 206352 - DNA, 25 bp, Canis familiaris
ttctccagttgaaaatctgttcgtt

SEQ ID NO: 206353 - DNA, 25 bp, Canis familiaris
ttctccagtttccacttgttggttt

SEQ ID NO: 206354 - DNA, 25 bp, Canis familiaris
ttctgacactttcacttttgcagat

SEQ ID NO: 206355 - DNA, 25 bp, Canis familiaris
ttctgacactttcacttttgcagat

SEQ ID NO: 206356 - DNA, 25 bp, Canis familiaris
ttctgacacgttggccactttgtca

SEQ ID NO: 206357 - DNA, 25 bp, Canis familiaris
ttctgaacgttcaaaccaagctcac

SEQ ID NO: 206358 - DNA, 25 bp, Canis familiaris
ttctggagggtcataacaagcattg

SEQ ID NO: 206359 - DNA, 25 bp, Canis familiaris
ttctgtgggtgtctatccaagccgt

SEQ ID NO: 206360 - DNA, 25 bp, Canis familiaris
ttctttagatgtcgtatccggagag

SEQ ID NO: 206361 - DNA, 25 bp, Canis familiaris
ttcttttgatgtagtatcacgtgta

SEQ ID NO: 206362 - DNA, 25 bp, Canis familiaris
ttctttcttgataggaatctgctta

SEQ ID NO: 206363 - DNA, 25 bp, Canis familiaris
ttctggtcttgtacttgtccttatg

SEQ ID NO: 206364 - DNA, 25 bp, Canis familiaris
ttctgcagtataatccttaccttgg

SEQ ID NO: 206365 - DNA, 25 bp, Canis familiaris
ttccagttgaatggttggcacttcg

SEQ ID NO: 206366 - DNA, 25 bp, Canis familiaris
ttccagctttagcataccactaaga

SEQ ID NO: 206367 - DNA, 25 bp, Canis familiaris
ttccagtctttgtaactcatcgaag

SEQ ID NO: 206368 - DNA, 25 bp, Canis familiaris
ttctcaggcccttatatgtccgtag

SEQ ID NO: 206369 - DNA, 25 bp, Canis familiaris
ttctcaggacctcagtgtatatgta

SEQ ID NO: 206370 - DNA, 25 bp, Canis familiaris
ttctcggtgcttttgtctttgtagt

SEQ ID NO: 206371 - DNA, 25 bp, Canis familiaris
ttctctgtgtatgtgtacgcttgta

SEQ ID NO: 206372 - DNA, 25 bp, Canis familiaris
ttctctgatgttttggttcggtatt

SEQ ID NO: 206373 - DNA, 25 bp, Canis familiaris
ttctccagaagaaggtggggcttat

SEQ ID NO: 206374 - DNA, 25 bp, Canis familiaris
ttctgcgagaagggccagagggctt

SEQ ID NO: 206375 - DNA, 25 bp, Canis familiaris
ttcgtgacatgagaccgaccgtttc

SEQ ID NO: 206376 - DNA, 25 bp, Canis familiaris
ttcgagcatcataccctcgattccg

SEQ ID NO: 206377 - DNA, 25 bp, Canis familiaris
ttcgagcatcataccctcgattccg

SEQ ID NO: 206378 - DNA, 25 bp, Canis familiaris
ttcgagcatcataccctcgattccg

SEQ ID NO: 206379 - DNA, 25 bp, Canis familiaris
ttcgagcatcataccctcgattccg

SEQ ID NO: 206380 - DNA, 25 bp, Canis familiaris
ttcgagcatcataccctcgattccg

SEQ ID NO: 206381 - DNA, 25 bp, Canis familiaris
ttcggatctgacccatcaaatctca

SEQ ID NO: 206382 - DNA, 25 bp, Canis familiaris
ttctggttgacaactcacctccaaa

SEQ ID NO: 206383 - DNA, 25 bp, Canis familiaris
ttcggtctaagtaccacccagatga

SEQ ID NO: 206384 - DNA, 25 bp, Canis familiaris
ttctggttaaagacacccaggccat

SEQ ID NO: 206385 - DNA, 25 bp, Canis familiaris
ttgctgggtttacacctaggtctgc

SEQ ID NO: 206386 - DNA, 25 bp, Canis familiaris
ttctggttttactaccatagccttt

SEQ ID NO: 206387 - DNA, 25 bp, Canis familiaris
ttctgagcattttaccactgcaagc

SEQ ID NO: 206388 - DNA, 25 bp, Canis familiaris
ttctgagtatattctctcttgagga

SEQ ID NO: 206389 - DNA, 25 bp, Canis familiaris
ttctgcactacctttcactgagtga

SEQ ID NO: 206390 - DNA, 25 bp, Canis familiaris
ttctgtttgcttttcactgagtcca

SEQ ID NO: 206391 - DNA, 25 bp, Canis familiaris
ttctagttcttgttcaatggtggca

SEQ ID NO: 206392 - DNA, 25 bp, Canis familiaris
ttctggtttgtgcctcacagggagc

SEQ ID NO: 206393 - DNA, 25 bp, Canis familiaris
ttcggagcttgagctgctgcgggat

SEQ ID NO: 206394 - DNA, 25 bp, Canis familiaris
ttcggcttctgagccatgcacgtag

SEQ ID NO: 206395 - DNA, 25 bp, Canis familiaris
ttcggaactgaggccatgattaaga

SEQ ID NO: 206396 - DNA, 25 bp, Canis familiaris
ttctgagagtcaagctgcgcaacca

SEQ ID NO: 206397 - DNA, 25 bp, Canis familiaris
ttctgagtgacaagtgcctgcccag

SEQ ID NO: 206398 - DNA, 25 bp, Canis familiaris
ttctgaggagcgggcactgcttgca

SEQ ID NO: 206399 - DNA, 25 bp, Canis familiaris
ttctgaccactggccactgaatgat

SEQ ID NO: 206400 - DNA, 25 bp, Canis familiaris
ttctgagctgaccctcttgagtatt

SEQ ID NO: 206401 - DNA, 25 bp, Canis familiaris
ttctctggctgtctttgagttttgt

SEQ ID NO: 206402 - DNA, 25 bp, Canis familiaris
ttctgttggattttctggtttgttt

SEQ ID NO: 206403 - DNA, 25 bp, Canis familiaris
ttcgttgtctattttctatttttct

SEQ ID NO: 206404 - DNA, 25 bp, Canis familiaris
ttctttcctggatttctatgttctt

SEQ ID NO: 206405 - DNA, 25 bp, Canis familiaris
ttcttaccagtatttgctattgtta

SEQ ID NO: 206406 - DNA, 25 bp, Canis familiaris
ttcgtatccgtctaactgtatgttc

SEQ ID NO: 206407 - DNA, 25 bp, Canis familiaris
ttccgatgccctgaggctcttttcc

SEQ ID NO: 206408 - DNA, 25 bp, Canis familiaris
ttccgatgccctgaggctcttttcc

SEQ ID NO: 206409 - DNA, 25 bp, Canis familiaris
ttccgtccggaggtatctactgacc

SEQ ID NO: 206410 - DNA, 25 bp, Canis familiaris
ttcggtcctggagggctgtgcaatg

SEQ ID NO: 206411 - DNA, 25 bp, Canis familiaris
ttcggctctttgtgggtgactgaga

SEQ ID NO: 206412 - DNA, 25 bp, Canis familiaris
ttgtggcacttggggcgaggacaaa

SEQ ID NO: 206413 - DNA, 25 bp, Canis familiaris
ttctacactttctggaggcacacac

SEQ ID NO: 206414 - DNA, 25 bp, Canis familiaris
ttctctgcactgtcctaggggaacc

SEQ ID NO: 206415 - DNA, 25 bp, Canis familiaris
ttctgctcactgtgcttgccaataa

SEQ ID NO: 206416 - DNA, 25 bp, Canis familiaris
ttctgtcacagccgcttgacaatgc

SEQ ID NO: 206417 - DNA, 25 bp, Canis familiaris
ttctgaagcagcagcttgagttatt

SEQ ID NO: 206418 - DNA, 25 bp, Canis familiaris
ttctgaacacattccatagtctctc

SEQ ID NO: 206419 - DNA, 25 bp, Canis familiaris
ttctcaataagataaggctgctgca

SEQ ID NO: 206420 - DNA, 25 bp, Canis familiaris
ttctcaaacaattaggtcttcatcc

SEQ ID NO: 206421 - DNA, 25 bp, Canis familiaris
ttctacaagaataccgccttctctc

SEQ ID NO: 206422 - DNA, 25 bp, Canis familiaris
ttctagcaacattggaccctgtctg

SEQ ID NO: 206423 - DNA, 25 bp, Canis familiaris
ttctatttctcataacacctctgta

SEQ ID NO: 206424 - DNA, 25 bp, Canis familiaris
ttctctacctaacaccctatgtgac

SEQ ID NO: 206425 - DNA, 25 bp, Canis familiaris
ttctctcatcctgatttcctatagt

SEQ ID NO: 206426 - DNA, 25 bp, Canis familiaris
ttctcttactctgtatctctttgta

SEQ ID NO: 206427 - DNA, 25 bp, Canis familiaris
ttctccaagtctgctagccatgtag

SEQ ID NO: 206428 - DNA, 25 bp, Canis familiaris
ttctgcctatacaacaagctagcta

SEQ ID NO: 206429 - DNA, 25 bp, Canis familiaris
ttctctcttcaaacaggtgcatctg

SEQ ID NO: 206430 - DNA, 25 bp, Canis familiaris
ttctgcttacacaacttggcactga

SEQ ID NO: 206431 - DNA, 25 bp, Canis familiaris
ttctgttgacatttcttccagctca

SEQ ID NO: 206432 - DNA, 25 bp, Canis familiaris
ttctgtggacaccactgagctctgc

SEQ ID NO: 206433 - DNA, 25 bp, Canis familiaris
ttctgtggagcccatggcatgctga

SEQ ID NO: 206434 - DNA, 25 bp, Canis familiaris
ttctgagctggccgggttgcaagcc

SEQ ID NO: 206435 - DNA, 25 bp, Canis familiaris
ttctggctgctggaggctttgacag

SEQ ID NO: 206436 - DNA, 25 bp, Canis familiaris
ttctgaacttggcctttgacttgag

SEQ ID NO: 206437 - DNA, 25 bp, Canis familiaris
ttctggacattctcttctgtttaga

SEQ ID NO: 206438 - DNA, 25 bp, Canis familiaris
ttcggactattgcgctttgttcaac

SEQ ID NO: 206439 - DNA, 25 bp, Canis familiaris
ttcgggttgacccttgtatgccaca

SEQ ID NO: 206440 - DNA, 25 bp, Canis familiaris
ttctgggtgtggcatcctttgaagc

SEQ ID NO: 206441 - DNA, 25 bp, Canis familiaris
ttcgggttgttgtcacgtttagctg

SEQ ID NO: 206442 - DNA, 25 bp, Canis familiaris
ttcggggttttagtgttgtcagagt

SEQ ID NO: 206443 - DNA, 25 bp, Canis familiaris
ttctgggtgttttttcaggttgagg

SEQ ID NO: 206444 - DNA, 25 bp, Canis familiaris
ttctaggtattcatttcagcgttat

SEQ ID NO: 206445 - DNA, 25 bp, Canis familiaris
ttctgcatggtttattttccctctg

SEQ ID NO: 206446 - DNA, 25 bp, Canis familiaris
ttcgctgagcttgttgtacacaggt

SEQ ID NO: 206447 - DNA, 25 bp, Canis familiaris
ttcgctgatttggctgttcccaatg

SEQ ID NO: 206448 - DNA, 25 bp, Canis familiaris
ttctgtcgtctgactattcccaagt

SEQ ID NO: 206449 - DNA, 25 bp, Canis familiaris
ttctgacaccgttcagtcaccaact

SEQ ID NO: 206450 - DNA, 25 bp, Canis familiaris
ttctgaccaggatccccaaggtcaa

SEQ ID NO: 206451 - DNA, 25 bp, Canis familiaris
ttctgaccgaggtgaccgacgtcta

SEQ ID NO: 206452 - DNA, 25 bp, Canis familiaris
ttcgtcccatgggtgacctgggtca

SEQ ID NO: 206453 - DNA, 25 bp, Canis familiaris
ttctggccatgagaggaactgaggt

SEQ ID NO: 206454 - DNA, 25 bp, Canis familiaris
ttctgcgcctgagccagggcatgat

SEQ ID NO: 206455 - DNA, 25 bp, Canis familiaris
ttcgccactcaggaagtgctgtccg

SEQ ID NO: 206456 - DNA, 25 bp, Canis familiaris
ttctgggccggaagttgtatcgtgc

SEQ ID NO: 206457 - DNA, 25 bp, Canis familiaris
ttctggccggaagtttgtatcgtgc

SEQ ID NO: 206458 - DNA, 25 bp, Canis familiaris
ttctctccagaatttttgttatgtg

SEQ ID NO: 206459 - DNA, 25 bp, Canis familiaris
ttctgcatccaggtcttcagtttct

SEQ ID NO: 206460 - DNA, 25 bp, Canis familiaris
ttctgtctaggtaatatctttcatg

SEQ ID NO: 206461 - DNA, 25 bp, Canis familiaris
ttctgcttcagacaatacgcttcat

SEQ ID NO: 206462 - DNA, 25 bp, Canis familiaris
ttctcattgccaaaacaccaccatt

SEQ ID NO: 206463 - DNA, 25 bp, Canis familiaris
ttctcaagccataacaaagcacgtg

SEQ ID NO: 206464 - DNA, 25 bp, Canis familiaris
ttctgcagggctgaaagcacaggtg

SEQ ID NO: 206465 - DNA, 25 bp, Canis familiaris
ttctgacaggaggatcacgccgtgg

SEQ ID NO: 206466 - DNA, 25 bp, Canis familiaris
ttcgatcgtgcaggtcacgacggtg

SEQ ID NO: 206467 - DNA, 25 bp, Canis familiaris
ttcgacttccgctggcaagagatgc

SEQ ID NO: 206468 - DNA, 25 bp, Canis familiaris
ttcgaggatcccttggagggtcaag

SEQ ID NO: 206469 - DNA, 25 bp, Canis familiaris
ttctgggatccctagagattttcat

SEQ ID NO: 206470 - DNA, 25 bp, Canis familiaris
ttctgggacctgggtgttcccatgg

SEQ ID NO: 206471 - DNA, 25 bp, Canis familiaris
ttctcggagtctcgggtcttccgag

SEQ ID NO: 206472 - DNA, 25 bp, Canis familiaris
ttccggagtcggcagtttgcagcct

SEQ ID NO: 206473 - DNA, 25 bp, Canis familiaris
ttgaccgagtcctgactatgtgccc

SEQ ID NO: 206474 - DNA, 25 bp, Canis familiaris
ttccacaagtcctgcgtggatccct

SEQ ID NO: 206475 - DNA, 25 bp, Canis familiaris
ttgcaatttccctcgggatggcgcg

SEQ ID NO: 206476 - DNA, 25 bp, Canis familiaris
ttccttgacaactacgggttgcgga

SEQ ID NO: 206477 - DNA, 25 bp, Canis familiaris
ttcccagtaagtgcggcttcgggag

SEQ ID NO: 206478 - DNA, 25 bp, Canis familiaris
ttcccagtaagtgcgggtcataagc

SEQ ID NO: 206479 - DNA, 25 bp, Canis familiaris
ttcccagtaagtgcgggtcataagc

SEQ ID NO: 206480 - DNA, 25 bp, Canis familiaris
ttcccggaatgtgcgtacaagtaca

SEQ ID NO: 206481 - DNA, 25 bp, Canis familiaris
ttctccagggtgacgtttcaagcta

SEQ ID NO: 206482 - DNA, 25 bp, Canis familiaris
ttctccctgcttgttttcatagcta

SEQ ID NO: 206483 - DNA, 25 bp, Canis familiaris
ttgttccagcttgttccaggactac

SEQ ID NO: 206484 - DNA, 25 bp, Canis familiaris
ttctctcaagtatgttccaaatcta

SEQ ID NO: 206485 - DNA, 25 bp, Canis familiaris
ttctcgaagcaatgttcatctaatt

SEQ ID NO: 206486 - DNA, 25 bp, Canis familiaris
ttctatacagcaaacttgatttttt

SEQ ID NO: 206487 - DNA, 25 bp, Canis familiaris
ttctctggcacaacctatgtgtttg

SEQ ID NO: 206488 - DNA, 25 bp, Canis familiaris
ttcctgcagagcaccctttttgaaa

SEQ ID NO: 206489 - DNA, 25 bp, Canis familiaris
ttctcccagctttctttttaataga

SEQ ID NO: 206490 - DNA, 25 bp, Canis familiaris
ttctccagacttattattttccaca

SEQ ID NO: 206491 - DNA, 25 bp, Canis familiaris
ttctttgcctgtttaagctttccgc

SEQ ID NO: 206492 - DNA, 25 bp, Canis familiaris
ttccttcaggtatcaagtttcctca

SEQ ID NO: 206493 - DNA, 25 bp, Canis familiaris
ttgctttaggtatccgtgatccctc

SEQ ID NO: 206494 - DNA, 25 bp, Canis familiaris
ttctttggagcataccagctgtccc

SEQ ID NO: 206495 - DNA, 25 bp, Canis familiaris
ttctttgtgaggctattgctctccc

SEQ ID NO: 206496 - DNA, 25 bp, Canis familiaris
ttctttgtagtcctcattgtcatcc

SEQ ID NO: 206497 - DNA, 25 bp, Canis familiaris
ttctctctaatgacctatttcactt

SEQ ID NO: 206498 - DNA, 25 bp, Canis familiaris
ttctcctttacaaattgtacattga

SEQ ID NO: 206499 - DNA, 25 bp, Canis familiaris
ttcccacttccttattaaatgttct

SEQ ID NO: 206500 - DNA, 25 bp, Canis familiaris
ttcccaggcctctctaaaatgttta

SEQ ID NO: 206501 - DNA, 25 bp, Canis familiaris
ttcctcgtgcctaattacaaactca

SEQ ID NO: 206502 - DNA, 25 bp, Canis familiaris
ttctctcgccgtcatcttaatgacg

SEQ ID NO: 206503 - DNA, 25 bp, Canis familiaris
ttctctgcccttcttcatgaataaa

SEQ ID NO: 206504 - DNA, 25 bp, Canis familiaris
ttctcatctgcccttgtaatgcaaa

SEQ ID NO: 206505 - DNA, 25 bp, Canis familiaris
ttctcagatgtccttgcacagctgc

SEQ ID NO: 206506 - DNA, 25 bp, Canis familiaris
ttctatgcagtggttctcagtccca

SEQ ID NO: 206507 - DNA, 25 bp, Canis familiaris
ttcgtcatgtatgcttcctcaatca

SEQ ID NO: 206508 - DNA, 25 bp, Canis familiaris
ttcgatcagaatgtctcatacaacc

SEQ ID NO: 206509 - DNA, 25 bp, Canis familiaris
ttcctgcagaatgtgctcaacaacc

SEQ ID NO: 206510 - DNA, 25 bp, Canis familiaris
ttcgtggatgatacccaacagcccc

SEQ ID NO: 206511 - DNA, 25 bp, Canis familiaris
ttctggagatgaattgctcagcaag

SEQ ID NO: 206512 - DNA, 25 bp, Canis familiaris
ttctggcagcgattctgacagtgag

SEQ ID NO: 206513 - DNA, 25 bp, Canis familiaris
ttctgctgcacgtggctgagtgtga

SEQ ID NO: 206514 - DNA, 25 bp, Canis familiaris
ttctgtgctgcgtgcttagggcaaa

SEQ ID NO: 206515 - DNA, 25 bp, Canis familiaris
ttctgtgctggttgccaagaggtca

SEQ ID NO: 206516 - DNA, 25 bp, Canis familiaris
ttctctgggtgccgatcaagttcac

SEQ ID NO: 206517 - DNA, 25 bp, Canis familiaris
ttgccggagtgacatctacttctgc

SEQ ID NO: 206518 - DNA, 25 bp, Canis familiaris
ttcctgggggagtctaccatcgtag

SEQ ID NO: 206519 - DNA, 25 bp, Canis familiaris
ttccggtaggagccgtcatcaattg

SEQ ID NO: 206520 - DNA, 25 bp, Canis familiaris
ttccaggctacgtcgggatcaaggc

SEQ ID NO: 206521 - DNA, 25 bp, Canis familiaris
ttccagccaaggactgggaccttct

SEQ ID NO: 206522 - DNA, 25 bp, Canis familiaris
ttccaggagggatgggcctttcttg

SEQ ID NO: 206523 - DNA, 25 bp, Canis familiaris
ttcgcagggggatgatgcccccccg

SEQ ID NO: 206524 - DNA, 25 bp, Canis familiaris
ttcctagagtggggagcctccctgg

SEQ ID NO: 206525 - DNA, 25 bp, Canis familiaris
ttctccggtggcttagcacggggtg

SEQ ID NO: 206526 - DNA, 25 bp, Canis familiaris
ttcccgtgggcttccactaaagtgg

SEQ ID NO: 206527 - DNA, 25 bp, Canis familiaris
ttctccgcggtttcctaataaagtg

SEQ ID NO: 206528 - DNA, 25 bp, Canis familiaris
ttctcccctataatccttatcaacg

SEQ ID NO: 206529 - DNA, 25 bp, Canis familiaris
ttctcccacttaaaatctatcagtc

SEQ ID NO: 206530 - DNA, 25 bp, Canis familiaris
ttctcaccctggtacaactgtcaga

SEQ ID NO: 206531 - DNA, 25 bp, Canis familiaris
ttctagcccttattctacttacact

SEQ ID NO: 206532 - DNA, 25 bp, Canis familiaris
ttctggctttgttaattttacctat

SEQ ID NO: 206533 - DNA, 25 bp, Canis familiaris
ttctgtgttttctaatttttctaca

SEQ ID NO: 206534 - DNA, 25 bp, Canis familiaris
ttctgctgtcatatccaaagttgtt

SEQ ID NO: 206535 - DNA, 25 bp, Canis familiaris
ttcgatgtctgtccactcaaggttt

SEQ ID NO: 206536 - DNA, 25 bp, Canis familiaris
ttcgttcttccagcaaaggcttcca

SEQ ID NO: 206537 - DNA, 25 bp, Canis familiaris
ttccttccccaggaggggcttgaca

SEQ ID NO: 206538 - DNA, 25 bp, Canis familiaris
ttctctgggcgccaagtgtgggtgt

SEQ ID NO: 206539 - DNA, 25 bp, Canis familiaris
ttctcgcaggcctagggatgggggt

SEQ ID NO: 206540 - DNA, 25 bp, Canis familiaris
ttctacacaccatcgtgggctggtg

SEQ ID NO: 206541 - DNA, 25 bp, Canis familiaris
ttctccacccagtggggcacagagg

SEQ ID NO: 206542 - DNA, 25 bp, Canis familiaris
ttctccccacagcttgaggacggga

SEQ ID NO: 206543 - DNA, 25 bp, Canis familiaris
ttctcccaggagcaagaggagcgga

SEQ ID NO: 206544 - DNA, 25 bp, Canis familiaris
ttctcccctgagcagaggctgcagc

SEQ ID NO: 206545 - DNA, 25 bp, Canis familiaris
ttctccccaggttactggcatcttg

SEQ ID NO: 206546 - DNA, 25 bp, Canis familiaris
ttctccccatttttcttatgtcatg

SEQ ID NO: 206547 - DNA, 25 bp, Canis familiaris
ttctctcgaatactctttcttgcta

SEQ ID NO: 206548 - DNA, 25 bp, Canis familiaris
ttctatcaactgcatttgtcttcca

SEQ ID NO: 206549 - DNA, 25 bp, Canis familiaris
ttctagctcaaggctgtgagtcctc

SEQ ID NO: 206550 - DNA, 25 bp, Canis familiaris
ttctcaatccaggctgtgtgtccac

SEQ ID NO: 206551 - DNA, 25 bp, Canis familiaris
ttctcacatctcagctgttgctgtc

SEQ ID NO: 206552 - DNA, 25 bp, Canis familiaris
ttctccatatcatttgttggctaaa

SEQ ID NO: 206553 - DNA, 25 bp, Canis familiaris
ttctgagctgaattcttgttgtaaa

SEQ ID NO: 206554 - DNA, 25 bp, Canis familiaris
ttctcgccactgtgtgcttgtagtg

SEQ ID NO: 206555 - DNA, 25 bp, Canis familiaris
ttctctgtcttgggctgctatattt

SEQ ID NO: 206556 - DNA, 25 bp, Canis familiaris
ttctcaatttgcagctgtctctctg

SEQ ID NO: 206557 - DNA, 25 bp, Canis familiaris
ttctaactattcttgctctcatgct

SEQ ID NO: 206558 - DNA, 25 bp, Canis familiaris
ttctacacatgaaatatccctgtta

SEQ ID NO: 206559 - DNA, 25 bp, Canis familiaris
ttcgacatctgtaagtcctgctgat

SEQ ID NO: 206560 - DNA, 25 bp, Canis familiaris
ttctccatagtggcattcctgtcat

SEQ ID NO: 206561 - DNA, 25 bp, Canis familiaris
ttctctgtgtgtgtacctgttgtat

SEQ ID NO: 206562 - DNA, 25 bp, Canis familiaris
ttctctggtgctgtgacctctaaag

SEQ ID NO: 206563 - DNA, 25 bp, Canis familiaris
ttctcatgaactgatgaccctttct

SEQ ID NO: 206564 - DNA, 25 bp, Canis familiaris
ttctgcagaagcagtaccctactcc

SEQ ID NO: 206565 - DNA, 25 bp, Canis familiaris
ttcgagaggcggttcatcttttcca

SEQ ID NO: 206566 - DNA, 25 bp, Canis familiaris
ttctggagccagcattctttcttgc

SEQ ID NO: 206567 - DNA, 25 bp, Canis familiaris
ttctgttccagaatgcatctatttt

SEQ ID NO: 206568 - DNA, 25 bp, Canis familiaris
ttctgtgccctggtgcataacttct

SEQ ID NO: 206569 - DNA, 25 bp, Canis familiaris
ttctggagccagaagctacagcttt

SEQ ID NO: 206570 - DNA, 25 bp, Canis familiaris
ttcgtcaaatcaaggacagttttaa

SEQ ID NO: 206571 - DNA, 25 bp, Canis familiaris
ttcgtttacatactccagtcctata

SEQ ID NO: 206572 - DNA, 25 bp, Canis familiaris
ttcgttattggacccatgttctata

SEQ ID NO: 206573 - DNA, 25 bp, Canis familiaris
ttctgtttctggacacctatggtga

SEQ ID NO: 206574 - DNA, 25 bp, Canis familiaris
ttctgttgttagcctcccatgaaat

SEQ ID NO: 206575 - DNA, 25 bp, Canis familiaris
ttctgttttcatcctccttggaaga

SEQ ID NO: 206576 - DNA, 25 bp, Canis familiaris
ttcgctgtgtttcctactgtggata

SEQ ID NO: 206577 - DNA, 25 bp, Canis familiaris
ttctgctgggtctcatttctgaata

SEQ ID NO: 206578 - DNA, 25 bp, Canis familiaris
ttctgtggccctgtttgtgaattgc

SEQ ID NO: 206579 - DNA, 25 bp, Canis familiaris
ttcgaggccctgtaattggaatgag

SEQ ID NO: 206580 - DNA, 25 bp, Canis familiaris
ttcgagcccctgcttggaaagacat

SEQ ID NO: 206581 - DNA, 25 bp, Canis familiaris
ttcgacacctcccaagtgaaggata

SEQ ID NO: 206582 - DNA, 25 bp, Canis familiaris
ttcgatagcacccccaggaagggag

SEQ ID NO: 206583 - DNA, 25 bp, Canis familiaris
ttcgccaacaaccctcgagagttga

SEQ ID NO: 206584 - DNA, 25 bp, Canis familiaris
ttgctacttcaaccccgtggtataa

SEQ ID NO: 206585 - DNA, 25 bp, Canis familiaris
ttgtaccgaacttacgatcaatata

SEQ ID NO: 206586 - DNA, 25 bp, Canis familiaris
ttgggcctgcatttggactgaagtt

SEQ ID NO: 206587 - DNA, 25 bp, Canis familiaris
ttgggatctgtcttggcattaaacc

SEQ ID NO: 206588 - DNA, 25 bp, Canis familiaris
ttgggatttcccgatgtgacacatc

SEQ ID NO: 206589 - DNA, 25 bp, Canis familiaris
ttcgaatgtgtcggggtgccagcac

SEQ ID NO: 206590 - DNA, 25 bp, Canis familiaris
ttcggagtctctgatggaccatgac

SEQ ID NO: 206591 - DNA, 25 bp, Canis familiaris
ttctggacctgcacaagagcctggt

SEQ ID NO: 206592 - DNA, 25 bp, Canis familiaris
ttcggtctttagcacattctggtgg

SEQ ID NO: 206593 - DNA, 25 bp, Canis familiaris
ttcctgtcatgggaggcctactggt

SEQ ID NO: 206594 - DNA, 25 bp, Canis familiaris
ttcccatcatgtgaagccaactgcc

SEQ ID NO: 206595 - DNA, 25 bp, Canis familiaris
ttctctatgtgtgtagacgccgcca

SEQ ID NO: 206596 - DNA, 25 bp, Canis familiaris
ttctctctcttcttataggggcaca

SEQ ID NO: 206597 - DNA, 25 bp, Canis familiaris
ttctcctctgcctaagcagtggcca

SEQ ID NO: 206598 - DNA, 25 bp, Canis familiaris
ttctctcagcagggcaagcagtggg

SEQ ID NO: 206599 - DNA, 25 bp, Canis familiaris
ttctctcaacccagcagtgcatgag

SEQ ID NO: 206600 - DNA, 25 bp, Canis familiaris
ttctcctcaaactcattgcagcaga

SEQ ID NO: 206601 - DNA, 25 bp, Canis familiaris
ttctcacctcattctacattcagaa

SEQ ID NO: 206602 - DNA, 25 bp, Canis familiaris
ttctgctgccatacactaactcaaa

SEQ ID NO: 206603 - DNA, 25 bp, Canis familiaris
ttctccttagagaaagctcaagaaa

SEQ ID NO: 206604 - DNA, 25 bp, Canis familiaris
ttctccctagaaacaaaccatagac

SEQ ID NO: 206605 - DNA, 25 bp, Canis familiaris
ttggcccttaattaaacctgacact

SEQ ID NO: 206606 - DNA, 25 bp, Canis familiaris
ttggccctacaaaagctggttacct

SEQ ID NO: 206607 - DNA, 25 bp, Canis familiaris
ttcccctacgatcacgtatacacct

SEQ ID NO: 206608 - DNA, 25 bp, Canis familiaris
ttccgcgtacgagtcaggtaataca

SEQ ID NO: 206609 - DNA, 25 bp, Canis familiaris
ttgctggcagatccgaccggttaac

SEQ ID NO: 206610 - DNA, 25 bp, Canis familiaris
ttctggagacaccacttgtgctctg

SEQ ID NO: 206611 - DNA, 25 bp, Canis familiaris
ttctgccaggaccgcttctactggc

SEQ ID NO: 206612 - DNA, 25 bp, Canis familiaris
ttctgcacaagagcctgaccaagcc

SEQ ID NO: 206613 - DNA, 25 bp, Canis familiaris
ttctggaaatccatgaccaccacca

SEQ ID NO: 206614 - DNA, 25 bp, Canis familiaris
ttctcagcttatgcagatgacccct

SEQ ID NO: 206615 - DNA, 25 bp, Canis familiaris
ttctcatgcttttcaaattacccca

SEQ ID NO: 206616 - DNA, 25 bp, Canis familiaris
ttctctctttaatgtatatccacct

SEQ ID NO: 206617 - DNA, 25 bp, Canis familiaris
ttcgcttttctttgttatccatccg

SEQ ID NO: 206618 - DNA, 25 bp, Canis familiaris
ttctcagtttctgattctctccaac

SEQ ID NO: 206619 - DNA, 25 bp, Canis familiaris
ttctctttggctgattcatccacca

SEQ ID NO: 206620 - DNA, 25 bp, Canis familiaris
ttcctgttggagattctgtcccacc

SEQ ID NO: 206621 - DNA, 25 bp, Canis familiaris
ttccttctgagggttttacgatgct

SEQ ID NO: 206622 - DNA, 25 bp, Canis familiaris
ttgccttcgattttgtttccgacta

SEQ ID NO: 206623 - DNA, 25 bp, Canis familiaris
ttctcttctgtttctttggttcaaa

SEQ ID NO: 206624 - DNA, 25 bp, Canis familiaris
ttctcttcttattttcatggtcaca

SEQ ID NO: 206625 - DNA, 25 bp, Canis familiaris
ttctcattgtctttttgcatcagga

SEQ ID NO: 206626 - DNA, 25 bp, Canis familiaris
ttctctcctcatttatcacactgga

SEQ ID NO: 206627 - DNA, 25 bp, Canis familiaris
ttctctgacttgtttcacttagaat

SEQ ID NO: 206628 - DNA, 25 bp, Canis familiaris
ttctccagcttgtagcccattagaa

SEQ ID NO: 206629 - DNA, 25 bp, Canis familiaris
ttctctggcacaaggcccttggagt

SEQ ID NO: 206630 - DNA, 25 bp, Canis familiaris
ttcctgagcgacaccactatggaga

SEQ ID NO: 206631 - DNA, 25 bp, Canis familiaris
ttcgcgcacaactacgacctgaaga

SEQ ID NO: 206632 - DNA, 25 bp, Canis familiaris
ttcccaaccagagagccatcatatt

SEQ ID NO: 206633 - DNA, 25 bp, Canis familiaris
ttctccaatccatgaaacatactat

SEQ ID NO: 206634 - DNA, 25 bp, Canis familiaris
ttctgtatatccccaaatctgactt

SEQ ID NO: 206635 - DNA, 25 bp, Canis familiaris
ttctgtcatggacccaacactattc

SEQ ID NO: 206636 - DNA, 25 bp, Canis familiaris
ttctccatgacacctcgagactgtc

SEQ ID NO: 206637 - DNA, 25 bp, Canis familiaris
ttctcctgatagccacactttgtaa

SEQ ID NO: 206638 - DNA, 25 bp, Canis familiaris
ttctcctgatcctacagtttctaca

SEQ ID NO: 206639 - DNA, 25 bp, Canis familiaris
ttctgcctgcctcaagtatttgtca

SEQ ID NO: 206640 - DNA, 25 bp, Canis familiaris
ttctgcctgcgcaggatgaatttgc

SEQ ID NO: 206641 - DNA, 25 bp, Canis familiaris
ttctctctgcctagcgtggatgggc

SEQ ID NO: 206642 - DNA, 25 bp, Canis familiaris
ttctctgcttctttaggtggggtgc

SEQ ID NO: 206643 - DNA, 25 bp, Canis familiaris
ttctctgcacctgtcatttggggtt

SEQ ID NO: 206644 - DNA, 25 bp, Canis familiaris
ttctgtacctgatctcattggcttt

SEQ ID NO: 206645 - DNA, 25 bp, Canis familiaris
ttcgccaactacatcatgcggtttt

SEQ ID NO: 206646 - DNA, 25 bp, Canis familiaris
ttgcccaactaaatactgtaacact

SEQ ID NO: 206647 - DNA, 25 bp, Canis familiaris
ttgccttgtaaattaatataacctt

SEQ ID NO: 206648 - DNA, 25 bp, Canis familiaris
ttctgttgtttttaaagcacccatt

SEQ ID NO: 206649 - DNA, 25 bp, Canis familiaris
ttctctttctttttaaactgtatat

SEQ ID NO: 206650 - DNA, 25 bp, Canis familiaris
ttctctgcactatttttacaacttt

SEQ ID NO: 206651 - DNA, 25 bp, Canis familiaris
ttctcagtattattcttgacttttt

SEQ ID NO: 206652 - DNA, 25 bp, Canis familiaris
ttctcagtttattttgtcaagtatt

SEQ ID NO: 206653 - DNA, 25 bp, Canis familiaris
ttctggttgctttctcttaatatat

SEQ ID NO: 206654 - DNA, 25 bp, Canis familiaris
ttctgcgtttggtactgatgagtta

SEQ ID NO: 206655 - DNA, 25 bp, Canis familiaris
ttctcctttggttgctggcagattc

SEQ ID NO: 206656 - DNA, 25 bp, Canis familiaris
ttcgagcttgtagtctctaccattc

SEQ ID NO: 206657 - DNA, 25 bp, Canis familiaris
ttcgcctatgctatcgctagcgatg

SEQ ID NO: 206658 - DNA, 25 bp, Canis familiaris
ttctccatgtctatcctcgtgacaa

SEQ ID NO: 206659 - DNA, 25 bp, Canis familiaris
ttctcctgtcctacatccagattat

SEQ ID NO: 206660 - DNA, 25 bp, Canis familiaris
ttctctttccttccttatgtatgaa

SEQ ID NO: 206661 - DNA, 25 bp, Canis familiaris
ttctctttttgttctcttttgatag

SEQ ID NO: 206662 - DNA, 25 bp, Canis familiaris
ttctgtttgtttggtcctgcttgaa

SEQ ID NO: 206663 - DNA, 25 bp, Canis familiaris
ttccaattttgcattccgttgcagc

SEQ ID NO: 206664 - DNA, 25 bp, Canis familiaris
ttgtcaatgtcttcagttaggtctg

SEQ ID NO: 206665 - DNA, 25 bp, Canis familiaris
ttgccttattcacgttagcgtgtct

SEQ ID NO: 206666 - DNA, 25 bp, Canis familiaris
ttgccttcttagatgttgtcttcca

SEQ ID NO: 206667 - DNA, 25 bp, Canis familiaris
ttgccttccctgagggatcgtccaa

SEQ ID NO: 206668 - DNA, 25 bp, Canis familiaris
ttctcttccacgagggctggtggcg

SEQ ID NO: 206669 - DNA, 25 bp, Canis familiaris
ttctctgtcccagggggtggtgcag

SEQ ID NO: 206670 - DNA, 25 bp, Canis familiaris
ttctgcttcctcagctggaaaggag

SEQ ID NO: 206671 - DNA, 25 bp, Canis familiaris
ttctgtctccaccctggaaatgggg

SEQ ID NO: 206672 - DNA, 25 bp, Canis familiaris
ttctgtccaactctgccgaatggag

SEQ ID NO: 206673 - DNA, 25 bp, Canis familiaris
ttctgtgcacaagtgttcggaacca

SEQ ID NO: 206674 - DNA, 25 bp, Canis familiaris
ttctgtgcacatttgtactttgaaa

SEQ ID NO: 206675 - DNA, 25 bp, Canis familiaris
ttctccactgggtaatgtggaaaaa

SEQ ID NO: 206676 - DNA, 25 bp, Canis familiaris
ttctccgttggtgttgctgtgaaga

SEQ ID NO: 206677 - DNA, 25 bp, Canis familiaris
ttctctctgctttggtttgtttgga

SEQ ID NO: 206678 - DNA, 25 bp, Canis familiaris
ttctcttgcctgtgtttttatagtg

SEQ ID NO: 206679 - DNA, 25 bp, Canis familiaris
ttctctatccagttcctttattggg

SEQ ID NO: 206680 - DNA, 25 bp, Canis familiaris
ttctgctgacggttcctgttactga

SEQ ID NO: 206681 - DNA, 25 bp, Canis familiaris
ttctccctgagttgccagttttagc

SEQ ID NO: 206682 - DNA, 25 bp, Canis familiaris
ttcctctgcgaatccgttttcagtt

SEQ ID NO: 206683 - DNA, 25 bp, Canis familiaris
ttcccccaaacccttgattcatagg

SEQ ID NO: 206684 - DNA, 25 bp, Canis familiaris
ttcccccagagactgtttaccgaag

SEQ ID NO: 206685 - DNA, 25 bp, Canis familiaris
ttctccccaggcatgatcgtttaaa

SEQ ID NO: 206686 - DNA, 25 bp, Canis familiaris
ttgtctcccagactaccagatatgt

SEQ ID NO: 206687 - DNA, 25 bp, Canis familiaris
ttgtccctgcagtgcccataggccc

SEQ ID NO: 206688 - DNA, 25 bp, Canis familiaris
ttggggcgaggacaaaggcccaaga

SEQ ID NO: 206689 - DNA, 25 bp, Canis familiaris
ttgtggttggaataaaggacgcaga

SEQ ID NO: 206690 - DNA, 25 bp, Canis familiaris
ttgcgcgaaggaatggaaaggggat

SEQ ID NO: 206691 - DNA, 25 bp, Canis familiaris
ttctgcagccaggaaggaagagtta

SEQ ID NO: 206692 - DNA, 25 bp, Canis familiaris
ttctgcagccaggaaggaagagtta

SEQ ID NO: 206693 - DNA, 25 bp, Canis familiaris
ttctgagcgagccttggaagagata

SEQ ID NO: 206694 - DNA, 25 bp, Canis familiaris
ttctgtgacactctggagagagcaa

SEQ ID NO: 206695 - DNA, 25 bp, Canis familiaris
ttctctccacatatggcagctcagt

SEQ ID NO: 206696 - DNA, 25 bp, Canis familiaris
ttctcccacactgtggcgcagtgtc

SEQ ID NO: 206697 - DNA, 25 bp, Canis familiaris
ttctctccacgtgtggcaacttgct

SEQ ID NO: 206698 - DNA, 25 bp, Canis familiaris
ttcctcacacggctctgaacaaggg

SEQ ID NO: 206699 - DNA, 25 bp, Canis familiaris
ttcccccatggttctggaaagggtg

SEQ ID NO: 206700 - DNA, 25 bp, Canis familiaris
ttctccccgagtacgagatagcagg

SEQ ID NO: 206701 - DNA, 25 bp, Canis familiaris
ttctcaccgggtacctgttgtgtgt

SEQ ID NO: 206702 - DNA, 25 bp, Canis familiaris
ttccgctaggttagtttgttgattc

SEQ ID NO: 206703 - DNA, 25 bp, Canis familiaris
ttcccggagtttgtacttgtcactt

SEQ ID NO: 206704 - DNA, 25 bp, Canis familiaris
ttgtcgcctttttggtacttgtcac

SEQ ID NO: 206705 - DNA, 25 bp, Canis familiaris
ttccgttgctttaggtatccgtgat

SEQ ID NO: 206706 - DNA, 25 bp, Canis familiaris
ttcccttgcagttatgtttcctctg

SEQ ID NO: 206707 - DNA, 25 bp, Canis familiaris
ttctggcattgccttttttgacatt

SEQ ID NO: 206708 - DNA, 25 bp, Canis familiaris
ttctgcctccgtgctatatgtgaac

SEQ ID NO: 206709 - DNA, 25 bp, Canis familiaris
ttctggtccacttctgtattgaaaa

SEQ ID NO: 206710 - DNA, 25 bp, Canis familiaris
ttctggcccctaagtattgctgcct

SEQ ID NO: 206711 - DNA, 25 bp, Canis familiaris
ttctggccccctggtatggtggggg

SEQ ID NO: 206712 - DNA, 25 bp, Canis familiaris
ttcggacccaagggctgggggtgtg

SEQ ID NO: 206713 - DNA, 25 bp, Canis familiaris
ttcccccacatcacgtctggggttt

SEQ ID NO: 206714 - DNA, 25 bp, Canis familiaris
ttccacccacacctattggtggttc

SEQ ID NO: 206715 - DNA, 25 bp, Canis familiaris
ttccagccccatccttttgaggggg

SEQ ID NO: 206716 - DNA, 25 bp, Canis familiaris
ttcctcacccgtgtttgacgtggat

SEQ ID NO: 206717 - DNA, 25 bp, Canis familiaris
ttctctcaacaccacctttaaaggt

SEQ ID NO: 206718 - DNA, 25 bp, Canis familiaris
ttccataaacccgttttcacaagag

SEQ ID NO: 206719 - DNA, 25 bp, Canis familiaris
ttccatgccaagtgctttttaccga

SEQ ID NO: 206720 - DNA, 25 bp, Canis familiaris
ttcctgcccagggcactaactacct

SEQ ID NO: 206721 - DNA, 25 bp, Canis familiaris
ttcggccgagcagcactattctggc

SEQ ID NO: 206722 - DNA, 25 bp, Canis familiaris
ttccgcctgggcgggattctgactt

SEQ ID NO: 206723 - DNA, 25 bp, Canis familiaris
ttctccctggcggggacatggggtt

SEQ ID NO: 206724 - DNA, 25 bp, Canis familiaris
ttctcctctgtccgtcaaatggtga

SEQ ID NO: 206725 - DNA, 25 bp, Canis familiaris
ttctccatctgcgactgtgcaaatg

SEQ ID NO: 206726 - DNA, 25 bp, Canis familiaris
ttctctcatctgggtggctgtagac

SEQ ID NO: 206727 - DNA, 25 bp, Canis familiaris
ttctctacaggccttctgctgagac

SEQ ID NO: 206728 - DNA, 25 bp, Canis familiaris
ttccattcgggcttcccagagagag

SEQ ID NO: 206729 - DNA, 25 bp, Canis familiaris
ttgtctttgggtttcacggatgttc

SEQ ID NO: 206730 - DNA, 25 bp, Canis familiaris
ttctctttcggtttgcagtgtgttt

SEQ ID NO: 206731 - DNA, 25 bp, Canis familiaris
ttcctttagccttagcagtggttat

SEQ ID NO: 206732 - DNA, 25 bp, Canis familiaris
ttccgcgatagactaacagggcttc

SEQ ID NO: 206733 - DNA, 25 bp, Canis familiaris
ttccggactttgcaaagccttcttg

SEQ ID NO: 206734 - DNA, 25 bp, Canis familiaris
ttccgggagttgaaccaggttgctt

SEQ ID NO: 206735 - DNA, 25 bp, Canis familiaris
ttctctggaggaggtcaccaggtgg

SEQ ID NO: 206736 - DNA, 25 bp, Canis familiaris
ttctccggacgcgtcaagaggtcga

SEQ ID NO: 206737 - DNA, 25 bp, Canis familiaris
ttcccttaagcagtctagtggtcca

SEQ ID NO: 206738 - DNA, 25 bp, Canis familiaris
ttctgtcttgaagtttctgtggttc

SEQ ID NO: 206739 - DNA, 25 bp, Canis familiaris
ttctgtcctggttattggtagttct

SEQ ID NO: 206740 - DNA, 25 bp, Canis familiaris
ttctgtcctgttctgtgaaatggtt

SEQ ID NO: 206741 - DNA, 25 bp, Canis familiaris
ttctgtgctcgtaccatgttgttgg

SEQ ID NO: 206742 - DNA, 25 bp, Canis familiaris
ttctggcctgccaagtttttgtggg

SEQ ID NO: 206743 - DNA, 25 bp, Canis familiaris
ttctggcccctggtatggtgggggt

SEQ ID NO: 206744 - DNA, 25 bp, Canis familiaris
ttcggcacgagggtttgggagggct

SEQ ID NO: 206745 - DNA, 25 bp, Canis familiaris
ttcggcacgagggttggacggcaag

SEQ ID NO: 206746 - DNA, 25 bp, Canis familiaris
ttggctaccgggaggacggcatcag

SEQ ID NO: 206747 - DNA, 25 bp, Canis familiaris
ttccttctcgggtggccaggagagg

SEQ ID NO: 206748 - DNA, 25 bp, Canis familiaris
ttcctcccagggtcgttcaggataa

SEQ ID NO: 206749 - DNA, 25 bp, Canis familiaris
ttcctcccaggatctattcttttgg

SEQ ID NO: 206750 - DNA, 25 bp, Canis familiaris
ttcccgaccttgtaatttgtttgtg

SEQ ID NO: 206751 - DNA, 25 bp, Canis familiaris
ttccgtgcacctatttatatttttg

SEQ ID NO: 206752 - DNA, 25 bp, Canis familiaris
ttctctctcccttatttttatattt

SEQ ID NO: 206753 - DNA, 25 bp, Canis familiaris
ttctcttccctatactaatctgttt

SEQ ID NO: 206754 - DNA, 25 bp, Canis familiaris
ttctctccctcaggaatctgagatc

SEQ ID NO: 206755 - DNA, 25 bp, Canis familiaris
ttctcccttctggacctggatgaag

SEQ ID NO: 206756 - DNA, 25 bp, Canis familiaris
ttctcccttctacttctggatgaat

SEQ ID NO: 206757 - DNA, 25 bp, Canis familiaris
ttctcccttttgataagcagacacc

SEQ ID NO: 206758 - DNA, 25 bp, Canis familiaris
ttctcccctctttctaagagacctg

SEQ ID NO: 206759 - DNA, 25 bp, Canis familiaris
ttctcccctctttctaagagacctg

SEQ ID NO: 206760 - DNA, 25 bp, Canis familiaris
ttctcccctctttctaagagacctg

SEQ ID NO: 206761 - DNA, 25 bp, Canis familiaris
ttctcccctctttctaagagacctg

SEQ ID NO: 206762 - DNA, 25 bp, Canis familiaris
ttctcccctctttctaagagacctg

SEQ ID NO: 206763 - DNA, 25 bp, Canis familiaris
ttctcccctctttctaagagacctg

SEQ ID NO: 206764 - DNA, 25 bp, Canis familiaris
ttctcccctctttctaagagacctg

SEQ ID NO: 206765 - DNA, 25 bp, Canis familiaris
ttctcccctctttctaagagacctg

SEQ ID NO: 206766 - DNA, 25 bp, Canis familiaris
ttctcccctctttctaagagacctg

SEQ ID NO: 206767 - DNA, 25 bp, Canis familiaris
ttctcccctctttctaagagacctg

SEQ ID NO: 206768 - DNA, 25 bp, Canis familiaris
ttctcccctctttctaagagacctg

SEQ ID NO: 206769 - DNA, 25 bp, Canis familiaris
ttctcccctctttctaagagacctg

SEQ ID NO: 206770 - DNA, 25 bp, Canis familiaris
ttctcccctctttctaagagacctg

SEQ ID NO: 206771 - DNA, 25 bp, Canis familiaris
ttctcccctctttctaagagacctg

SEQ ID NO: 206772 - DNA, 25 bp, Canis familiaris
ttctcccctctttctaagagacctg

SEQ ID NO: 206773 - DNA, 25 bp, Canis familiaris
ttctcccctctttctaagagaccgt

SEQ ID NO: 206774 - DNA, 25 bp, Canis familiaris
ttctcccctctgttttaagagacct

SEQ ID NO: 206775 - DNA, 25 bp, Canis familiaris
ttctctaccctgagttgaagataga

SEQ ID NO: 206776 - DNA, 25 bp, Canis familiaris
ttctgttcccttctgtgaaatggtt

SEQ ID NO: 206777 - DNA, 25 bp, Canis familiaris
ttctctgtgcccttcacggaaatga

SEQ ID NO: 206778 - DNA, 25 bp, Canis familiaris
ttctctgtgcccttcacggaaatga

SEQ ID NO: 206779 - DNA, 25 bp, Canis familiaris
ttctgctctgccagaccaggatgat

SEQ ID NO: 206780 - DNA, 25 bp, Canis familiaris
ttctgctgatccaggccaggttcag

SEQ ID NO: 206781 - DNA, 25 bp, Canis familiaris
ttcctataatcaagccctgcttcag

SEQ ID NO: 206782 - DNA, 25 bp, Canis familiaris
ttccatatattggccctgctaaaat

SEQ ID NO: 206783 - DNA, 25 bp, Canis familiaris
ttctctgataagactcctgctcaca

SEQ ID NO: 206784 - DNA, 25 bp, Canis familiaris
ttctctgtgtatagcagctctcgcc

SEQ ID NO: 206785 - DNA, 25 bp, Canis familiaris
ttctgctgtgttaagactctgccca

SEQ ID NO: 206786 - DNA, 25 bp, Canis familiaris
ttctgctgtgttaagtgctggcgcc

SEQ ID NO: 206787 - DNA, 25 bp, Canis familiaris
ttctcctgtcttgtcatgtgctgaa

SEQ ID NO: 206788 - DNA, 25 bp, Canis familiaris
ttctctctgttgtcagtgtgtgtgt

SEQ ID NO: 206789 - DNA, 25 bp, Canis familiaris
ttctctctcctgcagtatgagtgat

SEQ ID NO: 206790 - DNA, 25 bp, Canis familiaris
ttcgctacactcctgtggcaggatt

SEQ ID NO: 206791 - DNA, 25 bp, Canis familiaris
ttctctacccttggaagtatttctg

SEQ ID NO: 206792 - DNA, 25 bp, Canis familiaris
ttcccatcccttgaatggactccga

SEQ ID NO: 206793 - DNA, 25 bp, Canis familiaris
ttcccaccagggaaagaaccctgca

SEQ ID NO: 206794 - DNA, 25 bp, Canis familiaris
ttccccggggatgagacacttgtga

SEQ ID NO: 206795 - DNA, 25 bp, Canis familiaris
ttcccagggggaaagactatctata

SEQ ID NO: 206796 - DNA, 25 bp, Canis familiaris
ttcccttggggatggaatgcataat

SEQ ID NO: 206797 - DNA, 25 bp, Canis familiaris
ttctccttgggaacggggcaactca

SEQ ID NO: 206798 - DNA, 25 bp, Canis familiaris
ttctccccccaaggaaggaacatca

SEQ ID NO: 206799 - DNA, 25 bp, Canis familiaris
ttccccgggatagcaagctgaacga

SEQ ID NO: 206800 - DNA, 25 bp, Canis familiaris
ttctcgccggagaaactggctgacc

SEQ ID NO: 206801 - DNA, 25 bp, Canis familiaris
ttccgctcgtggagactacttccgt

SEQ ID NO: 206802 - DNA, 25 bp, Canis familiaris
ttccatctgtggtttgagctacgtc

SEQ ID NO: 206803 - DNA, 25 bp, Canis familiaris
ttcctatgtgggcgacgaggcccag

SEQ ID NO: 206804 - DNA, 25 bp, Canis familiaris
ttctctcgtgggagacgcaggcaca

SEQ ID NO: 206805 - DNA, 25 bp, Canis familiaris
ttctccgtggacatgacctgtgaag

SEQ ID NO: 206806 - DNA, 25 bp, Canis familiaris
ttctccagcaggatgtccctctgga

SEQ ID NO: 206807 - DNA, 25 bp, Canis familiaris
ttctgccgcaagtttcgtctggatt

SEQ ID NO: 206808 - DNA, 25 bp, Canis familiaris
ttctgttctcatgtgtcgttgagtt

SEQ ID NO: 206809 - DNA, 25 bp, Canis familiaris
ttctctctccatgtgtcactaagtg

SEQ ID NO: 206810 - DNA, 25 bp, Canis familiaris
ttctctctccttgctcaaaatgtgg

SEQ ID NO: 206811 - DNA, 25 bp, Canis familiaris
ttcccacctctgcctaatatattgc

SEQ ID NO: 206812 - DNA, 25 bp, Canis familiaris
ttcccccagggttattcagatgcca

SEQ ID NO: 206813 - DNA, 25 bp, Canis familiaris
ttccctccaggattttaatattatt

SEQ ID NO: 206814 - DNA, 25 bp, Canis familiaris
ttcccggaccttagcttatttatct

SEQ ID NO: 206815 - DNA, 25 bp, Canis familiaris
ttcccgttactggagttacattcgt

SEQ ID NO: 206816 - DNA, 25 bp, Canis familiaris
ttccctattagtgggtgaacaatcc

SEQ ID NO: 206817 - DNA, 25 bp, Canis familiaris
ttccgtttttgactgtaacaagact

SEQ ID NO: 206818 - DNA, 25 bp, Canis familiaris
ttccgttctttcctaataaaatctg

SEQ ID NO: 206819 - DNA, 25 bp, Canis familiaris
ttcccttctcttgctttttagagtt

SEQ ID NO: 206820 - DNA, 25 bp, Canis familiaris
ttccccttgtacctatctttgaagg

SEQ ID NO: 206821 - DNA, 25 bp, Canis familiaris
ttcccctaggacctatctttggagg

SEQ ID NO: 206822 - DNA, 25 bp, Canis familiaris
ttccccgggatcgtatttgtgccaa

SEQ ID NO: 206823 - DNA, 25 bp, Canis familiaris
ttccccggcaaagattttcttcaag

SEQ ID NO: 206824 - DNA, 25 bp, Canis familiaris
ttccccccagaaaatcactatcatt

SEQ ID NO: 206825 - DNA, 25 bp, Canis familiaris
ttcccctccaacatccagtaatgtt

SEQ ID NO: 206826 - DNA, 25 bp, Canis familiaris
ttccccttcagatcctttaatgtta

SEQ ID NO: 206827 - DNA, 25 bp, Canis familiaris
ttccctcgcgaatccgtgtaaagta

SEQ ID NO: 206828 - DNA, 25 bp, Canis familiaris
ttccccgcgaagaccgagcaaaatc

SEQ ID NO: 206829 - DNA, 25 bp, Canis familiaris
ttcgcccgaaagacgtacaacatcc

SEQ ID NO: 206830 - DNA, 25 bp, Canis familiaris
ttctgcccgaaaaggtacttcttgg

SEQ ID NO: 206831 - DNA, 25 bp, Canis familiaris
ttctgaccaaaaatgtcttcgtttt

SEQ ID NO: 206832 - DNA, 25 bp, Canis familiaris
ttctgaccaaagctgaactgtgctt

SEQ ID NO: 206833 - DNA, 25 bp, Canis familiaris
ttctgactccctggtgagtctggat

SEQ ID NO: 206834 - DNA, 25 bp, Canis familiaris
ttctgcctgccagtgtgaggacgga

SEQ ID NO: 206835 - DNA, 25 bp, Canis familiaris
ttctgcctgccagtgtgaggacgga

SEQ ID NO: 206836 - DNA, 25 bp, Canis familiaris
ttcgccgccagaatgagggaggata

SEQ ID NO: 206837 - DNA, 25 bp, Canis familiaris
ttcgacagcgacgtgggggagtacc

SEQ ID NO: 206838 - DNA, 25 bp, Canis familiaris
ttgctggccgacgtgaagggggcgc

SEQ ID NO: 206839 - DNA, 25 bp, Canis familiaris
ttcggcacgagagtccggggagcac

SEQ ID NO: 206840 - DNA, 25 bp, Canis familiaris
ttcggcgcaaggagcccaagagcca

SEQ ID NO: 206841 - DNA, 25 bp, Canis familiaris
ttgcccgctaggtgcaccaataaaa

SEQ ID NO: 206842 - DNA, 25 bp, Canis familiaris
ttctccgccatgaggaccatcaaca

SEQ ID NO: 206843 - DNA, 25 bp, Canis familiaris
ttctccagccagaaggaaaagactc

SEQ ID NO: 206844 - DNA, 25 bp, Canis familiaris
ttctcccaagtaatgtaaagccaag

SEQ ID NO: 206845 - DNA, 25 bp, Canis familiaris
ttctgcccagtttcattaaaccaac

SEQ ID NO: 206846 - DNA, 25 bp, Canis familiaris
ttctgccagtttcattaaacaaacc

SEQ ID NO: 206847 - DNA, 25 bp, Canis familiaris
ttctcctatccaccactaaacagaa

SEQ ID NO: 206848 - DNA, 25 bp, Canis familiaris
ttctccctcccagtgtatgtaaaat

SEQ ID NO: 206849 - DNA, 25 bp, Canis familiaris
ttctccccaccagtgatcaatgtca

SEQ ID NO: 206850 - DNA, 25 bp, Canis familiaris
ttctccagcccatcaataagtcatt

SEQ ID NO: 206851 - DNA, 25 bp, Canis familiaris
ttctccgcctcacagcagataaata

SEQ ID NO: 206852 - DNA, 25 bp, Canis familiaris
ttccggtctatctgagtaaattata

SEQ ID NO: 206853 - DNA, 25 bp, Canis familiaris
ttccattccttccaacaacaattta

SEQ ID NO: 206854 - DNA, 25 bp, Canis familiaris
ttccatgggtcgcaacttttatctt

SEQ ID NO: 206855 - DNA, 25 bp, Canis familiaris
ttgcctttgtctgaactatgggtct

SEQ ID NO: 206856 - DNA, 25 bp, Canis familiaris
ttcctttgtctctaaaactttgcat

SEQ ID NO: 206857 - DNA, 25 bp, Canis familiaris
ttccttttctataactatcctttgg

SEQ ID NO: 206858 - DNA, 25 bp, Canis familiaris
ttcctttgttgttaactcgctgggc

SEQ ID NO: 206859 - DNA, 25 bp, Canis familiaris
ttccctagtttaaatgtcgctcctc

SEQ ID NO: 206860 - DNA, 25 bp, Canis familiaris
ttccctattatcttcaaggccgcct

SEQ ID NO: 206861 - DNA, 25 bp, Canis familiaris
ttctgcacgtttttcaggaggcgca

SEQ ID NO: 206862 - DNA, 25 bp, Canis familiaris
ttcgcattttggtacaggagcgcct

SEQ ID NO: 206863 - DNA, 25 bp, Canis familiaris
ttcgcttcgctgtaacatttgccac

SEQ ID NO: 206864 - DNA, 25 bp, Canis familiaris
ttcgttcgtaagactctatcgagga

SEQ ID NO: 206865 - DNA, 25 bp, Canis familiaris
ttccaccgaaaggcttgccgcagga

SEQ ID NO: 206866 - DNA, 25 bp, Canis familiaris
ttcgcccgcaaaggggcgctgaggc

SEQ ID NO: 206867 - DNA, 25 bp, Canis familiaris
ttcctgcccaaacgaggggagtaat

SEQ ID NO: 206868 - DNA, 25 bp, Canis familiaris
ttcccggcacccaggagaagccaat

SEQ ID NO: 206869 - DNA, 25 bp, Canis familiaris
ttctccgagaccggaggagccgctc

SEQ ID NO: 206870 - DNA, 25 bp, Canis familiaris
ttctcctaactagactgcacttgtt

SEQ ID NO: 206871 - DNA, 25 bp, Canis familiaris
ttctccatagcatttaatcaccttt

SEQ ID NO: 206872 - DNA, 25 bp, Canis familiaris
ttctccacgagaagcaatcattcat

SEQ ID NO: 206873 - DNA, 25 bp, Canis familiaris
ttccgacagagtagacagcttcatg

SEQ ID NO: 206874 - DNA, 25 bp, Canis familiaris
ttcggtatgtgttctcttattccca

SEQ ID NO: 206875 - DNA, 25 bp, Canis familiaris
ttctgtattttttaccaatcttcaa

SEQ ID NO: 206876 - DNA, 25 bp, Canis familiaris
ttctgttttactatccacacctgta

SEQ ID NO: 206877 - DNA, 25 bp, Canis familiaris
ttctgttttagtttggtgatcttgc

SEQ ID NO: 206878 - DNA, 25 bp, Canis familiaris
ttctgtttctttttagtattatctg

SEQ ID NO: 206879 - DNA, 25 bp, Canis familiaris
ttctgtttgtttttttctatgtttg

SEQ ID NO: 206880 - DNA, 25 bp, Canis familiaris
ttctgtcctttgttttttgcttttg

SEQ ID NO: 206881 - DNA, 25 bp, Canis familiaris
ttctgtgcttttgttttgctgctgt

SEQ ID NO: 206882 - DNA, 25 bp, Canis familiaris
ttctgtttcaggtacatctcctcgt

SEQ ID NO: 206883 - DNA, 25 bp, Canis familiaris
ttgctggctacatgtacatcctacc

SEQ ID NO: 206884 - DNA, 25 bp, Canis familiaris
ttctcctaagtgctcatgcctggac

SEQ ID NO: 206885 - DNA, 25 bp, Canis familiaris
ttctcctgaggaggttcctggcctc

SEQ ID NO: 206886 - DNA, 25 bp, Canis familiaris
ttccggagagggatgcctgagttcc

SEQ ID NO: 206887 - DNA, 25 bp, Canis familiaris
ttgccgcggggtctttcagaaccgc

SEQ ID NO: 206888 - DNA, 25 bp, Canis familiaris
ttggtggggagtcggcttcagaccc

SEQ ID NO: 206889 - DNA, 25 bp, Canis familiaris
ttgttggggatttaagtgagaaaca

SEQ ID NO: 206890 - DNA, 25 bp, Canis familiaris
ttccatgggccttataagttatcaa

SEQ ID NO: 206891 - DNA, 25 bp, Canis familiaris
ttcgtgtggtcataaagattctcat

SEQ ID NO: 206892 - DNA, 25 bp, Canis familiaris
ttcgtctctctctacacaaaacaca

SEQ ID NO: 206893 - DNA, 25 bp, Canis familiaris
ttcgcatcacttcaacaacgcaacc

SEQ ID NO: 206894 - DNA, 25 bp, Canis familiaris
ttccacaacccattcataccagaac

SEQ ID NO: 206895 - DNA, 25 bp, Canis familiaris
ttccacaacccattcataccagaac

SEQ ID NO: 206896 - DNA, 25 bp, Canis familiaris
ttggccaccgtggtcaagcacgaac

SEQ ID NO: 206897 - DNA, 25 bp, Canis familiaris
ttggcccccttgtaggcactggggg

SEQ ID NO: 206898 - DNA, 25 bp, Canis familiaris
ttggccgaccttgtactgggagagg

SEQ ID NO: 206899 - DNA, 25 bp, Canis familiaris
ttgtggagacccgttcatcggggat

SEQ ID NO: 206900 - DNA, 25 bp, Canis familiaris
ttgaggaaccacttgaccggggaga

SEQ ID NO: 206901 - DNA, 25 bp, Canis familiaris
ttggtatacagttgcccgaggggga

SEQ ID NO: 206902 - DNA, 25 bp, Canis familiaris
ttgaaaacaggtgtcgagggtgcag

SEQ ID NO: 206903 - DNA, 25 bp, Canis familiaris
ttggagaacgttttcgaggtggagc

SEQ ID NO: 206904 - DNA, 25 bp, Canis familiaris
ttcgaaacgtcatccagcaggtcca

SEQ ID NO: 206905 - DNA, 25 bp, Canis familiaris
ttcgttcacttctttccaatgtcaa

SEQ ID NO: 206906 - DNA, 25 bp, Canis familiaris
ttccaacacattattgccctttaga

SEQ ID NO: 206907 - DNA, 25 bp, Canis familiaris
ttcccacttattgtcaccttgtaat

SEQ ID NO: 206908 - DNA, 25 bp, Canis familiaris
ttccaactctttcatcactaacaaa

SEQ ID NO: 206909 - DNA, 25 bp, Canis familiaris
ttccaactactttaagaatccaact

SEQ ID NO: 206910 - DNA, 25 bp, Canis familiaris
ttctgccctccttattaacatcggg

SEQ ID NO: 206911 - DNA, 25 bp, Canis familiaris
ttctgccctcctcatttataggggc

SEQ ID NO: 206912 - DNA, 25 bp, Canis familiaris
ttctgttctcctcagtgtttgcgga

SEQ ID NO: 206913 - DNA, 25 bp, Canis familiaris
ttcctgcttcttcagtctgtgggga

SEQ ID NO: 206914 - DNA, 25 bp, Canis familiaris
ttcctttgcctcctgttggggagag

SEQ ID NO: 206915 - DNA, 25 bp, Canis familiaris
ttccttcccaaggtgtcgtgtgagg

SEQ ID NO: 206916 - DNA, 25 bp, Canis familiaris
ttgacctccccacaactggatggag

SEQ ID NO: 206917 - DNA, 25 bp, Canis familiaris
ttccggcctcaccaaactgagggga

SEQ ID NO: 206918 - DNA, 25 bp, Canis familiaris
ttcctccctcctgaagccagagggc

SEQ ID NO: 206919 - DNA, 25 bp, Canis familiaris
ttccaggccctcgaggaccaaaggg

SEQ ID NO: 206920 - DNA, 25 bp, Canis familiaris
ttccatgcaggaatccggaccaaag

SEQ ID NO: 206921 - DNA, 25 bp, Canis familiaris
ttgcccgatgattccggacgctgat

SEQ ID NO: 206922 - DNA, 25 bp, Canis familiaris
ttcccagatgaatcccaggtgatgt

SEQ ID NO: 206923 - DNA, 25 bp, Canis familiaris
ttcccatgcagagccctgcgggaga

SEQ ID NO: 206924 - DNA, 25 bp, Canis familiaris
ttccatcagattccccttgggagtc

SEQ ID NO: 206925 - DNA, 25 bp, Canis familiaris
ttcccactttctcctgaggtagatc

SEQ ID NO: 206926 - DNA, 25 bp, Canis familiaris
ttccccttttacaaattgaacattg

SEQ ID NO: 206927 - DNA, 25 bp, Canis familiaris
ttcccttattttgatttaatcacca

SEQ ID NO: 206928 - DNA, 25 bp, Canis familiaris
ttccctatttttatccattacaata

SEQ ID NO: 206929 - DNA, 25 bp, Canis familiaris
ttccctaatttccatctagtttaat

SEQ ID NO: 206930 - DNA, 25 bp, Canis familiaris
ttccctaaatgccctctgatattat

SEQ ID NO: 206931 - DNA, 25 bp, Canis familiaris
ttctccagcaaacccttatctattg

SEQ ID NO: 206932 - DNA, 25 bp, Canis familiaris
ttccctggaactccttacagactgg

SEQ ID NO: 206933 - DNA, 25 bp, Canis familiaris
ttccgtggccggatgtccatgaagg

SEQ ID NO: 206934 - DNA, 25 bp, Canis familiaris
ttccggagcttgcagacaccaaagc

SEQ ID NO: 206935 - DNA, 25 bp, Canis familiaris
ttcctggtgcgcgagaaccgcaagt

SEQ ID NO: 206936 - DNA, 25 bp, Canis familiaris
ttcccggcccagggccgcagaggac

SEQ ID NO: 206937 - DNA, 25 bp, Canis familiaris
ttctccccccatctcatgaggagag

SEQ ID NO: 206938 - DNA, 25 bp, Canis familiaris
ttctccccctgttctgctggggagg

SEQ ID NO: 206939 - DNA, 25 bp, Canis familiaris
ttctcctccctgtgctgagagagtg

SEQ ID NO: 206940 - DNA, 25 bp, Canis familiaris
ttctccacccagtctcatgatggag

SEQ ID NO: 206941 - DNA, 25 bp, Canis familiaris
ttctccacaccattactgctgggga

SEQ ID NO: 206942 - DNA, 25 bp, Canis familiaris
ttctccacagcatcaaccctgggag

SEQ ID NO: 206943 - DNA, 25 bp, Canis familiaris
ttctgttcatgctcgactggtagga

SEQ ID NO: 206944 - DNA, 25 bp, Canis familiaris
ttcgctgaatatatacaggtatgta

SEQ ID NO: 206945 - DNA, 25 bp, Canis familiaris
ttccgagaatccttagcctgatcta

SEQ ID NO: 206946 - DNA, 25 bp, Canis familiaris
ttcccaaatcctgagtccacaaaac

SEQ ID NO: 206947 - DNA, 25 bp, Canis familiaris
ttccccactctagagttccaagata

SEQ ID NO: 206948 - DNA, 25 bp, Canis familiaris
ttccccttgaagagttcagcggatt

SEQ ID NO: 206949 - DNA, 25 bp, Canis familiaris
ttccccttgtagaagccacgggctt

SEQ ID NO: 206950 - DNA, 25 bp, Canis familiaris
ttccccctggagaaggctctggatg

SEQ ID NO: 206951 - DNA, 25 bp, Canis familiaris
ttccctaccagaatcatggccctga

SEQ ID NO: 206952 - DNA, 25 bp, Canis familiaris
ttcccacccagaacattcagcctgg

SEQ ID NO: 206953 - DNA, 25 bp, Canis familiaris
ttcccagaccaaacatcttccagga

SEQ ID NO: 206954 - DNA, 25 bp, Canis familiaris
ttccccactacaaacattccagttt

SEQ ID NO: 206955 - DNA, 25 bp, Canis familiaris
ttcctccctagcatagatactcttc

SEQ ID NO: 206956 - DNA, 25 bp, Canis familiaris
ttccaggccttgcggcatgacttga

SEQ ID NO: 206957 - DNA, 25 bp, Canis familiaris
ttccgtcccagacggaggctcggtt

SEQ ID NO: 206958 - DNA, 25 bp, Canis familiaris
ttccggggtgatcaaggctggcttt

SEQ ID NO: 206959 - DNA, 25 bp, Canis familiaris
ttcctggggttggctgagagttgac

SEQ ID NO: 206960 - DNA, 25 bp, Canis familiaris
ttcctggctggaggttgggctggat

SEQ ID NO: 206961 - DNA, 25 bp, Canis familiaris
ttctgtctgccttggctttggtgga

SEQ ID NO: 206962 - DNA, 25 bp, Canis familiaris
ttctgagctgcccggtttgcagtga

SEQ ID NO: 206963 - DNA, 25 bp, Canis familiaris
ttctgcctgctgcactttggagtga

SEQ ID NO: 206964 - DNA, 25 bp, Canis familiaris
ttctgccttgagcttctcaggtgag

SEQ ID NO: 206965 - DNA, 25 bp, Canis familiaris
ttccctctgtcgtttgacgtgacat

SEQ ID NO: 206966 - DNA, 25 bp, Canis familiaris
ttctgcctttcactggtactagact

SEQ ID NO: 206967 - DNA, 25 bp, Canis familiaris
ttcccattccgggtagctcagagct

SEQ ID NO: 206968 - DNA, 25 bp, Canis familiaris
ttccctgtttggttcctcaggctaa

SEQ ID NO: 206969 - DNA, 25 bp, Canis familiaris
ttcctgggtatggagtcctgcggca

SEQ ID NO: 206970 - DNA, 25 bp, Canis familiaris
ttccggatgtagggagcctggagaa

SEQ ID NO: 206971 - DNA, 25 bp, Canis familiaris
ttccggatctagcaaactcgagtct

SEQ ID NO: 206972 - DNA, 25 bp, Canis familiaris
ttggacaaatcagaaactgggtgcc

SEQ ID NO: 206973 - DNA, 25 bp, Canis familiaris
ttgagactttcaaaacctgtcccct

SEQ ID NO: 206974 - DNA, 25 bp, Canis familiaris
ttgatacctattaaacgttctacta

SEQ ID NO: 206975 - DNA, 25 bp, Canis familiaris
ttccacaaacttttcgttgccctga

SEQ ID NO: 206976 - DNA, 25 bp, Canis familiaris
ttcccaaaattgtattcctgaccga

SEQ ID NO: 206977 - DNA, 25 bp, Canis familiaris
ttcctaatattttttcctgcctaat

SEQ ID NO: 206978 - DNA, 25 bp, Canis familiaris
ttctgtttagtttttttcctgcaat

SEQ ID NO: 206979 - DNA, 25 bp, Canis familiaris
ttctgtttagtttttttcctgcaat

SEQ ID NO: 206980 - DNA, 25 bp, Canis familiaris
ttctgcttgatctgctttatttccc

SEQ ID NO: 206981 - DNA, 25 bp, Canis familiaris
ttctgagcagattcgtccttttcta

SEQ ID NO: 206982 - DNA, 25 bp, Canis familiaris
ttctgagacatgtgtatttttctct

SEQ ID NO: 206983 - DNA, 25 bp, Canis familiaris
ttctgccctgggacatttgtatctc

SEQ ID NO: 206984 - DNA, 25 bp, Canis familiaris
ttcccagctggaaatctctgacctc

SEQ ID NO: 206985 - DNA, 25 bp, Canis familiaris
ttctccagcctttgttctgagttgg

SEQ ID NO: 206986 - DNA, 25 bp, Canis familiaris
ttctccactcttgtggtgcagtctc

SEQ ID NO: 206987 - DNA, 25 bp, Canis familiaris
ttctgccttcctggggtgatgattg

SEQ ID NO: 206988 - DNA, 25 bp, Canis familiaris
ttctggtgtctttgggtgctgatgt

SEQ ID NO: 206989 - DNA, 25 bp, Canis familiaris
ttcggtgttctctagtctctgataa

SEQ ID NO: 206990 - DNA, 25 bp, Canis familiaris
ttctgtctttacttgtctctataaa

SEQ ID NO: 206991 - DNA, 25 bp, Canis familiaris
ttctgatgcttttaatgttctttta

SEQ ID NO: 206992 - DNA, 25 bp, Canis familiaris
ttctgatctctttacagatttctga

SEQ ID NO: 206993 - DNA, 25 bp, Canis familiaris
ttctcctatattccgcatttgctga

SEQ ID NO: 206994 - DNA, 25 bp, Canis familiaris
ttccctctttccttttgtgaatact

SEQ ID NO: 206995 - DNA, 25 bp, Canis familiaris
ttccgtgtttttttcaggacattct

SEQ ID NO: 206996 - DNA, 25 bp, Canis familiaris
ttcccttttatttattttcatgtct

SEQ ID NO: 206997 - DNA, 25 bp, Canis familiaris
ttcgttattgtttcattttctcatg

SEQ ID NO: 206998 - DNA, 25 bp, Canis familiaris
ttctgctctttgtttattcatttgg

SEQ ID NO: 206999 - DNA, 25 bp, Canis familiaris
ttctgcctatctaattatctatgta

SEQ ID NO: 207000 - DNA, 25 bp, Canis familiaris
ttctgcttcctaatggactagattc

SEQ ID NO: 207001 - DNA, 25 bp, Canis familiaris
ttctgcttttgcatgcaaccagccc

SEQ ID NO: 207002 - DNA, 25 bp, Canis familiaris
ttctgcctttgcagatgtgcctctc

SEQ ID NO: 207003 - DNA, 25 bp, Canis familiaris
ttccaattaaagactgcctctcctc

SEQ ID NO: 207004 - DNA, 25 bp, Canis familiaris
ttcgcattaatttactagcattcct

SEQ ID NO: 207005 - DNA, 25 bp, Canis familiaris
ttccaggaatccagctcagcatgct

SEQ ID NO: 207006 - DNA, 25 bp, Canis familiaris
ttcgcggaatccacatgttgctgtc

SEQ ID NO: 207007 - DNA, 25 bp, Canis familiaris
ttccggacatcagactattgctgag

SEQ ID NO: 207008 - DNA, 25 bp, Canis familiaris
ttccggaatagttcttttgatcgta

SEQ ID NO: 207009 - DNA, 25 bp, Canis familiaris
ttcctggtacgtatggtttcctgac

SEQ ID NO: 207010 - DNA, 25 bp, Canis familiaris
ttcctgatgtatcgttgtggcctac

SEQ ID NO: 207011 - DNA, 25 bp, Canis familiaris
ttccatcatgccgtgttggggctgc

SEQ ID NO: 207012 - DNA, 25 bp, Canis familiaris
ttccttccgtgtggcagtgggagtg

SEQ ID NO: 207013 - DNA, 25 bp, Canis familiaris
ttcctgtccctgtccagggtatttc

SEQ ID NO: 207014 - DNA, 25 bp, Canis familiaris
ttcgttgacctctcgggtcacaacc

SEQ ID NO: 207015 - DNA, 25 bp, Canis familiaris
ttcgttggaccggggcgtgacaact

SEQ ID NO: 207016 - DNA, 25 bp, Canis familiaris
ttcgtttgacctttaggtaaatgtg

SEQ ID NO: 207017 - DNA, 25 bp, Canis familiaris
ttcctttcctcttcgagttaaagct

SEQ ID NO: 207018 - DNA, 25 bp, Canis familiaris
ttcctggcctcggtccagtggaaag

SEQ ID NO: 207019 - DNA, 25 bp, Canis familiaris
ttccgttcctggtccatctgaataa

SEQ ID NO: 207020 - DNA, 25 bp, Canis familiaris
ttcctgtctccgttcagaccaagga

SEQ ID NO: 207021 - DNA, 25 bp, Canis familiaris
ttcctgtgttggtttcacccaagta

SEQ ID NO: 207022 - DNA, 25 bp, Canis familiaris
ttcgtgtggaacactcacccaacga

SEQ ID NO: 207023 - DNA, 25 bp, Canis familiaris
ttcgcgggatccagataccacccgg

SEQ ID NO: 207024 - DNA, 25 bp, Canis familiaris
ttccgggactgtacaaacaccaaag

SEQ ID NO: 207025 - DNA, 25 bp, Canis familiaris
ttccgctcgaaaaactctacctaag

SEQ ID NO: 207026 - DNA, 25 bp, Canis familiaris
ttctggctctggatcaactctacag

SEQ ID NO: 207027 - DNA, 25 bp, Canis familiaris
ttctgccttggcatccagcataaag

SEQ ID NO: 207028 - DNA, 25 bp, Canis familiaris
ttctggctgggcaacctcaaaaatc

SEQ ID NO: 207029 - DNA, 25 bp, Canis familiaris
ttctggctgctactgacctactaaa

SEQ ID NO: 207030 - DNA, 25 bp, Canis familiaris
ttctggatcatcctgtgatctcaaa

SEQ ID NO: 207031 - DNA, 25 bp, Canis familiaris
ttctggcactcccaagccagacgtc

SEQ ID NO: 207032 - DNA, 25 bp, Canis familiaris
ttcggactgctggacccaggagtca

SEQ ID NO: 207033 - DNA, 25 bp, Canis familiaris
ttcgtgaatctggacccgtcaggac

SEQ ID NO: 207034 - DNA, 25 bp, Canis familiaris
ttcggatcacgcccggagtagaagc

SEQ ID NO: 207035 - DNA, 25 bp, Canis familiaris
ttctggtgcaccgacgtgaggagca

SEQ ID NO: 207036 - DNA, 25 bp, Canis familiaris
ttctgagcgctttctcagtgggaca

SEQ ID NO: 207037 - DNA, 25 bp, Canis familiaris
ttctgtggactactctgctggagaa

SEQ ID NO: 207038 - DNA, 25 bp, Canis familiaris
ttcgcatgcgaggatggtcgagaaa

SEQ ID NO: 207039 - DNA, 25 bp, Canis familiaris
ttgtgcagcgatgaggatggaggac

SEQ ID NO: 207040 - DNA, 25 bp, Canis familiaris
ttgcatagtggtagtttgagtacag

SEQ ID NO: 207041 - DNA, 25 bp, Canis familiaris
ttcctgtgacatacgttatggacgt

SEQ ID NO: 207042 - DNA, 25 bp, Canis familiaris
ttcctgaacttcctttggtggttga

SEQ ID NO: 207043 - DNA, 25 bp, Canis familiaris
ttcctggaggaccggtggtgtttga

SEQ ID NO: 207044 - DNA, 25 bp, Canis familiaris
ttcccagcggatgggttgtgttctc

SEQ ID NO: 207045 - DNA, 25 bp, Canis familiaris
ttcccgggatctcgatgtgatttct

SEQ ID NO: 207046 - DNA, 25 bp, Canis familiaris
ttccctccaatccatgggattcatg

SEQ ID NO: 207047 - DNA, 25 bp, Canis familiaris
ttccctcatcaaggctacaattgct

SEQ ID NO: 207048 - DNA, 25 bp, Canis familiaris
ttcgcctcccaggtgacagtggaag

SEQ ID NO: 207049 - DNA, 25 bp, Canis familiaris
ttcccccagcagggtaggcactagc

SEQ ID NO: 207050 - DNA, 25 bp, Canis familiaris
ttccccttgaagcctcagagactac

SEQ ID NO: 207051 - DNA, 25 bp, Canis familiaris
ttcctgcctggaaagggagagaact

SEQ ID NO: 207052 - DNA, 25 bp, Canis familiaris
ttcccgggatcctggagagcaattc

SEQ ID NO: 207053 - DNA, 25 bp, Canis familiaris
ttcccgtccatgatcggacgacctc

SEQ ID NO: 207054 - DNA, 25 bp, Canis familiaris
ttcccgatccagagacaatggcccc

SEQ ID NO: 207055 - DNA, 25 bp, Canis familiaris
ttcccgcaacacaggatagttctac

SEQ ID NO: 207056 - DNA, 25 bp, Canis familiaris
ttccccaacacatagtttatttagc

SEQ ID NO: 207057 - DNA, 25 bp, Canis familiaris
ttccccaaataaaatgttcatttca

SEQ ID NO: 207058 - DNA, 25 bp, Canis familiaris
ttccccacaaacggagttatctcct

SEQ ID NO: 207059 - DNA, 25 bp, Canis familiaris
ttccccacaatgttcggttacaact

SEQ ID NO: 207060 - DNA, 25 bp, Canis familiaris
ttccgccacaaagtccgctttgaag

SEQ ID NO: 207061 - DNA, 25 bp, Canis familiaris
ttcccttaaattctgcttctgaaca

SEQ ID NO: 207062 - DNA, 25 bp, Canis familiaris
ttccctccaaaaccactgttgatac

SEQ ID NO: 207063 - DNA, 25 bp, Canis familiaris
ttcccatccccattgtagtttatca

SEQ ID NO: 207064 - DNA, 25 bp, Canis familiaris
ttgctcgaccccttttgattcgagt

SEQ ID NO: 207065 - DNA, 25 bp, Canis familiaris
ttgtctgaagcccatagttcaatag

SEQ ID NO: 207066 - DNA, 25 bp, Canis familiaris
ttcccatcatgcccattttgcagat

SEQ ID NO: 207067 - DNA, 25 bp, Canis familiaris
ttctgctcatatcacattctttttc

SEQ ID NO: 207068 - DNA, 25 bp, Canis familiaris
ttctgtcattgtcatcgctgtttgt

SEQ ID NO: 207069 - DNA, 25 bp, Canis familiaris
ttctgttggcagctcgtgccattgt

SEQ ID NO: 207070 - DNA, 25 bp, Canis familiaris
ttcgtatcagcacatctgtatatgt

SEQ ID NO: 207071 - DNA, 25 bp, Canis familiaris
ttctgtcctcacttagcattatatc

SEQ ID NO: 207072 - DNA, 25 bp, Canis familiaris
ttctgtgccggctatgactcgaagc

SEQ ID NO: 207073 - DNA, 25 bp, Canis familiaris
ttctgtccactctgcctggacagcc

SEQ ID NO: 207074 - DNA, 25 bp, Canis familiaris
ttctgtcacctgatggcttagcagc

SEQ ID NO: 207075 - DNA, 25 bp, Canis familiaris
ttctgtacctgcagcgttttgcacg

SEQ ID NO: 207076 - DNA, 25 bp, Canis familiaris
ttctggactctgatggtgtcttcca

SEQ ID NO: 207077 - DNA, 25 bp, Canis familiaris
ttcggactctgatggtgtttccaag

SEQ ID NO: 207078 - DNA, 25 bp, Canis familiaris
ttcggcctctttgggatttacacta

SEQ ID NO: 207079 - DNA, 25 bp, Canis familiaris
ttccacttcatttgtaacttaccta

SEQ ID NO: 207080 - DNA, 25 bp, Canis familiaris
ttcccgttttgtcagtttctctgat

SEQ ID NO: 207081 - DNA, 25 bp, Canis familiaris
ttcccgaagggtcactggttcatca

SEQ ID NO: 207082 - DNA, 25 bp, Canis familiaris
ttcccagggtgttcagttggtttca

SEQ ID NO: 207083 - DNA, 25 bp, Canis familiaris
ttcgctcggtgaatacatgttgcgt

SEQ ID NO: 207084 - DNA, 25 bp, Canis familiaris
ttcgctctggtgaatgcatgttctg

SEQ ID NO: 207085 - DNA, 25 bp, Canis familiaris
ttcgtctggagcactgtactgacca

SEQ ID NO: 207086 - DNA, 25 bp, Canis familiaris
ttcgtgggcggctttagctacgcag

SEQ ID NO: 207087 - DNA, 25 bp, Canis familiaris
ttctggtgccagccaatgtactacc

SEQ ID NO: 207088 - DNA, 25 bp, Canis familiaris
ttctgcacccagccaaatacatacc

SEQ ID NO: 207089 - DNA, 25 bp, Canis familiaris
ttcgaccagaggcaagactccgtcc

SEQ ID NO: 207090 - DNA, 25 bp, Canis familiaris
ttcggcacgaggcaagactctggtc

SEQ ID NO: 207091 - DNA, 25 bp, Canis familiaris
ttcggcacgaggcaaagatggtgaa

SEQ ID NO: 207092 - DNA, 25 bp, Canis familiaris
ttcggcctgacccagacatgtggaa

SEQ ID NO: 207093 - DNA, 25 bp, Canis familiaris
ttcgtagctgacccagactggaact

SEQ ID NO: 207094 - DNA, 25 bp, Canis familiaris
ttcctctgtgacccatttagaagtg

SEQ ID NO: 207095 - DNA, 25 bp, Canis familiaris
ttcccttgaaaccgttgcacagtgc

SEQ ID NO: 207096 - DNA, 25 bp, Canis familiaris
ttccctagagggcagtgtgtatgtg

SEQ ID NO: 207097 - DNA, 25 bp, Canis familiaris
ttgaccaagtgcccgggtctttaag

SEQ ID NO: 207098 - DNA, 25 bp, Canis familiaris
ttccaaagtaagcatgttctttaca

SEQ ID NO: 207099 - DNA, 25 bp, Canis familiaris
ttcctaatgggggtttctcttcctg

SEQ ID NO: 207100 - DNA, 25 bp, Canis familiaris
ttcccagaaccaggattctttccct

SEQ ID NO: 207101 - DNA, 25 bp, Canis familiaris
ttccctgaacaaagtgcaacctgcc

SEQ ID NO: 207102 - DNA, 25 bp, Canis familiaris
ttccgtgcccagaggaatctctata

SEQ ID NO: 207103 - DNA, 25 bp, Canis familiaris
ttcgcggtacagataacctgatcta

SEQ ID NO: 207104 - DNA, 25 bp, Canis familiaris
ttcccgataccaacagagccagtta

SEQ ID NO: 207105 - DNA, 25 bp, Canis familiaris
ttgcctggtaccagccaccagtaat

SEQ ID NO: 207106 - DNA, 25 bp, Canis familiaris
ttgcctggaatcccctacggatatt

SEQ ID NO: 207107 - DNA, 25 bp, Canis familiaris
ttccggaccacacctaaggacaaag

SEQ ID NO: 207108 - DNA, 25 bp, Canis familiaris
ttccagagaaagccttttggcccaa

SEQ ID NO: 207109 - DNA, 25 bp, Canis familiaris
ttgccaaaaggtctctggtcccaca

SEQ ID NO: 207110 - DNA, 25 bp, Canis familiaris
ttcccacatgggtgtgattccccac

SEQ ID NO: 207111 - DNA, 25 bp, Canis familiaris
ttcccctgggaggagttgtccacac

SEQ ID NO: 207112 - DNA, 25 bp, Canis familiaris
ttccccgagagagagttgtcccatt

SEQ ID NO: 207113 - DNA, 25 bp, Canis familiaris
ttcccggaagaaggggagccctgag

SEQ ID NO: 207114 - DNA, 25 bp, Canis familiaris
ttcccgcgcacacaaggggacctta

SEQ ID NO: 207115 - DNA, 25 bp, Canis familiaris
ttcccggacagtgagaggcacctct

SEQ ID NO: 207116 - DNA, 25 bp, Canis familiaris
ttcccgggatgtggggagccttcgg

SEQ ID NO: 207117 - DNA, 25 bp, Canis familiaris
ttcccgggatggatggagttgctgg

SEQ ID NO: 207118 - DNA, 25 bp, Canis familiaris
ttcccgggatggaggcaaaggtgca

SEQ ID NO: 207119 - DNA, 25 bp, Canis familiaris
ttcccgggatgacaacactaggctc

SEQ ID NO: 207120 - DNA, 25 bp, Canis familiaris
ttcccgggatcacaaccatgcgggg

SEQ ID NO: 207121 - DNA, 25 bp, Canis familiaris
ttcccgggatcttacacaggcggat

SEQ ID NO: 207122 - DNA, 25 bp, Canis familiaris
ttgcccggtgtttccaaacttgagc

SEQ ID NO: 207123 - DNA, 25 bp, Canis familiaris
ttcccagagttatcccgactaacaa

SEQ ID NO: 207124 - DNA, 25 bp, Canis familiaris
ttcccaagttggcctccaagtttca

SEQ ID NO: 207125 - DNA, 25 bp, Canis familiaris
ttccaagattctccccaaactttag

SEQ ID NO: 207126 - DNA, 25 bp, Canis familiaris
ttcctagttcccatcctattactag

SEQ ID NO: 207127 - DNA, 25 bp, Canis familiaris
ttcccctctttttcttattactgag

SEQ ID NO: 207128 - DNA, 25 bp, Canis familiaris
ttcccccttgtctttgttgtaagag

SEQ ID NO: 207129 - DNA, 25 bp, Canis familiaris
ttcgggctcgtggccttgttgtaaa

SEQ ID NO: 207130 - DNA, 25 bp, Canis familiaris
ttgtaagccctggactgagtttaga

SEQ ID NO: 207131 - DNA, 25 bp, Canis familiaris
ttgccaaccatgcctactgagtatg

SEQ ID NO: 207132 - DNA, 25 bp, Canis familiaris
ttccgaccataaacgatgccgactg

SEQ ID NO: 207133 - DNA, 25 bp, Canis familiaris
ttccgagccggaactggacagacgt

SEQ ID NO: 207134 - DNA, 25 bp, Canis familiaris
ttcctgaggggagcaaaccacgcaa

SEQ ID NO: 207135 - DNA, 25 bp, Canis familiaris
ttccctgagcgtcacaaaccaacaa

SEQ ID NO: 207136 - DNA, 25 bp, Canis familiaris
ttccctgggatctgcttcccaaaga

SEQ ID NO: 207137 - DNA, 25 bp, Canis familiaris
ttgcccttgaactactttaattaga

SEQ ID NO: 207138 - DNA, 25 bp, Canis familiaris
ttccctgggcctgtttaatgctaat

SEQ ID NO: 207139 - DNA, 25 bp, Canis familiaris
ttcccgggatctgtcctacaataca

SEQ ID NO: 207140 - DNA, 25 bp, Canis familiaris
ttcccagaagatgagtgccttagaa

SEQ ID NO: 207141 - DNA, 25 bp, Canis familiaris
ttcccctgtgatgaatctgattaga

SEQ ID NO: 207142 - DNA, 25 bp, Canis familiaris
ttcccgggatgtcatagtaaataat

SEQ ID NO: 207143 - DNA, 25 bp, Canis familiaris
ttcccgggatatcaggctcctggaa

SEQ ID NO: 207144 - DNA, 25 bp, Canis familiaris
ttcccgggatattgagtctccatat

SEQ ID NO: 207145 - DNA, 25 bp, Canis familiaris
ttccccaatgtattgagtgcccaat

SEQ ID NO: 207146 - DNA, 25 bp, Canis familiaris
ttccctaagatgtcgatggctgcca

SEQ ID NO: 207147 - DNA, 25 bp, Canis familiaris
ttcggaaagtgggctgacgacatca

SEQ ID NO: 207148 - DNA, 25 bp, Canis familiaris
ttcggaagagtgcgtgtctgcgtgc

SEQ ID NO: 207149 - DNA, 25 bp, Canis familiaris
ttcgagcaggagatggccactgccg

SEQ ID NO: 207150 - DNA, 25 bp, Canis familiaris
ttcggcacgagagtgatgaccgtac

SEQ ID NO: 207151 - DNA, 25 bp, Canis familiaris
ttcggcacgaggatcatggctgata

SEQ ID NO: 207152 - DNA, 25 bp, Canis familiaris
ttcccagccaggccacatgttgaga

SEQ ID NO: 207153 - DNA, 25 bp, Canis familiaris
ttcccatcatctagcatcacagtgg

SEQ ID NO: 207154 - DNA, 25 bp, Canis familiaris
ttcgttgcacaggcagacactgctg

SEQ ID NO: 207155 - DNA, 25 bp, Canis familiaris
ttgcgtctggatggcaaccgtctta

SEQ ID NO: 207156 - DNA, 25 bp, Canis familiaris
ttccgggaggaaccagtctctgaaa

SEQ ID NO: 207157 - DNA, 25 bp, Canis familiaris
ttccagggggcaccacaggatcaaa

SEQ ID NO: 207158 - DNA, 25 bp, Canis familiaris
ttccaggggcagccccgtcagaaag

SEQ ID NO: 207159 - DNA, 25 bp, Canis familiaris
ttgccaggtggacccctgtacatac

SEQ ID NO: 207160 - DNA, 25 bp, Canis familiaris
ttcctggaggaatgcctggaatggc

SEQ ID NO: 207161 - DNA, 25 bp, Canis familiaris
ttccaggggaagccccgatgtgccc

SEQ ID NO: 207162 - DNA, 25 bp, Canis familiaris
ttccaggggggagcccatcacctgg

SEQ ID NO: 207163 - DNA, 25 bp, Canis familiaris
ttcccagggaggacaatcgccacac

SEQ ID NO: 207164 - DNA, 25 bp, Canis familiaris
ttccctttagagaaatccaccagca

SEQ ID NO: 207165 - DNA, 25 bp, Canis familiaris
ttcccctgcatcagaaataaaccag

SEQ ID NO: 207166 - DNA, 25 bp, Canis familiaris
ttccccccaagacaataacagcact

SEQ ID NO: 207167 - DNA, 25 bp, Canis familiaris
ttccccctcacttgaacaaaacact

SEQ ID NO: 207168 - DNA, 25 bp, Canis familiaris
ttcccagcctcatagatgacttcaa

SEQ ID NO: 207169 - DNA, 25 bp, Canis familiaris
ttcccacaatcatctcatacctaag

SEQ ID NO: 207170 - DNA, 25 bp, Canis familiaris
ttcccatgcttttgacatcaccatg

SEQ ID NO: 207171 - DNA, 25 bp, Canis familiaris
ttccacattttatctctctatgctc

SEQ ID NO: 207172 - DNA, 25 bp, Canis familiaris
ttcccttctacagctgtgctatgca

SEQ ID NO: 207173 - DNA, 25 bp, Canis familiaris
ttccgtctctggtgtagctgatgat

SEQ ID NO: 207174 - DNA, 25 bp, Canis familiaris
ttccctctcgactacatagaagaca

SEQ ID NO: 207175 - DNA, 25 bp, Canis familiaris
ttcccctccacataggacgtaacca

SEQ ID NO: 207176 - DNA, 25 bp, Canis familiaris
ttcccactgtgccaaaaacagataa

SEQ ID NO: 207177 - DNA, 25 bp, Canis familiaris
ttcccagctgcccaggaaggcagca

SEQ ID NO: 207178 - DNA, 25 bp, Canis familiaris
ttccctgctgcagcagctgggggca

SEQ ID NO: 207179 - DNA, 25 bp, Canis familiaris
ttcccgcgcagtctggctgcgaagt

SEQ ID NO: 207180 - DNA, 25 bp, Canis familiaris
ttccccagaggtttgtctactgcat

SEQ ID NO: 207181 - DNA, 25 bp, Canis familiaris
ttccccagggtgttctctgacctgg

SEQ ID NO: 207182 - DNA, 25 bp, Canis familiaris
ttccccctggtattgtcttgccagg

SEQ ID NO: 207183 - DNA, 25 bp, Canis familiaris
ttccccctggtattgtcttgccagg

SEQ ID NO: 207184 - DNA, 25 bp, Canis familiaris
ttccccctggtattgtcttgccagg

SEQ ID NO: 207185 - DNA, 25 bp, Canis familiaris
ttccccctggtattgtcttgccagg

SEQ ID NO: 207186 - DNA, 25 bp, Canis familiaris
ttccccctggtattgtcttgccagg

SEQ ID NO: 207187 - DNA, 25 bp, Canis familiaris
ttccccctggtattgtcttgccagg

SEQ ID NO: 207188 - DNA, 25 bp, Canis familiaris
ttccccctggtattgtcttgccagg

SEQ ID NO: 207189 - DNA, 25 bp, Canis familiaris
ttccccctggtattgtcttgccagg

SEQ ID NO: 207190 - DNA, 25 bp, Canis familiaris
ttccctcctggttttctgtgagatg

SEQ ID NO: 207191 - DNA, 25 bp, Canis familiaris
ttcgactcacagtttgttgttggat

SEQ ID NO: 207192 - DNA, 25 bp, Canis familiaris
ttcgcaccattgcggtcgcgcggat

SEQ ID NO: 207193 - DNA, 25 bp, Canis familiaris
ttcgttgctgtctggcatccaggta

SEQ ID NO: 207194 - DNA, 25 bp, Canis familiaris
ttcgcttgtctggggcatctagagc

SEQ ID NO: 207195 - DNA, 25 bp, Canis familiaris
ttcccagtcatccaggcatctaagg

SEQ ID NO: 207196 - DNA, 25 bp, Canis familiaris
ttcccagcatgtccagacacgtaag

SEQ ID NO: 207197 - DNA, 25 bp, Canis familiaris
ttccctgctgtctgacttgtagtgc

SEQ ID NO: 207198 - DNA, 25 bp, Canis familiaris
ttccctagtgtctctgcatgtgaac

SEQ ID NO: 207199 - DNA, 25 bp, Canis familiaris
ttcctactgctgtcagcgctgagta

SEQ ID NO: 207200 - DNA, 25 bp, Canis familiaris
ttcctgcactctggtgcgcatatgt

SEQ ID NO: 207201 - DNA, 25 bp, Canis familiaris
ttcctcactgctctaacatgctgaa

SEQ ID NO: 207202 - DNA, 25 bp, Canis familiaris
ttgactatctgtcaacctccaagcg

SEQ ID NO: 207203 - DNA, 25 bp, Canis familiaris
ttgaataggtacaccttaagcaact

SEQ ID NO: 207204 - DNA, 25 bp, Canis familiaris
ttgaataggaaatctgcttaataat

SEQ ID NO: 207205 - DNA, 25 bp, Canis familiaris
ttgaacacgcaaaaccagggattat

SEQ ID NO: 207206 - DNA, 25 bp, Canis familiaris
ttgtacaccgatcatgaactcgttt

SEQ ID NO: 207207 - DNA, 25 bp, Canis familiaris
ttgacaagccgaaatggagcgtttt

SEQ ID NO: 207208 - DNA, 25 bp, Canis familiaris
ttgcaccccgacaaaagcttttcta

SEQ ID NO: 207209 - DNA, 25 bp, Canis familiaris
ttccacggcgaaatccacttttata

SEQ ID NO: 207210 - DNA, 25 bp, Canis familiaris
ttcccaataaagaccacttcatgta

SEQ ID NO: 207211 - DNA, 25 bp, Canis familiaris
ttcctggtcaaatccatttgctgta

SEQ ID NO: 207212 - DNA, 25 bp, Canis familiaris
ttcctggtaacctatcttcatttga

SEQ ID NO: 207213 - DNA, 25 bp, Canis familiaris
ttcctgggcctcttacattagtgga

SEQ ID NO: 207214 - DNA, 25 bp, Canis familiaris
ttcctggggttgtatcacgagatag

SEQ ID NO: 207215 - DNA, 25 bp, Canis familiaris
ttgcttggctggctactactgagca

SEQ ID NO: 207216 - DNA, 25 bp, Canis familiaris
ttctgtggctgccaaaccctggatt

SEQ ID NO: 207217 - DNA, 25 bp, Canis familiaris
ttctgtggctcccacgggagtgagt

SEQ ID NO: 207218 - DNA, 25 bp, Canis familiaris
ttctgggcttctttgggatggggaa

SEQ ID NO: 207219 - DNA, 25 bp, Canis familiaris
ttggacgtcctcttgggattgggga

SEQ ID NO: 207220 - DNA, 25 bp, Canis familiaris
ttgcgacgtcgcgacggggagggga

SEQ ID NO: 207221 - DNA, 25 bp, Canis familiaris
ttccccatcccaaggccaggtgggg

SEQ ID NO: 207222 - DNA, 25 bp, Canis familiaris
ttgcccaatacccaggcctgggaaa

SEQ ID NO: 207223 - DNA, 25 bp, Canis familiaris
ttgacaaaacctaacttgcgcagaa

SEQ ID NO: 207224 - DNA, 25 bp, Canis familiaris
ttgacaaaacctgtccggcatttga

SEQ ID NO: 207225 - DNA, 25 bp, Canis familiaris
ttgaaaatccctgtggccagtttga

SEQ ID NO: 207226 - DNA, 25 bp, Canis familiaris
ttggactaacctttggagcggtaga

SEQ ID NO: 207227 - DNA, 25 bp, Canis familiaris
ttgccctgaacgtgtggtcggtgag

SEQ ID NO: 207228 - DNA, 25 bp, Canis familiaris
ttgggctacactgaggaccaggttg

SEQ ID NO: 207229 - DNA, 25 bp, Canis familiaris
ttcgtgaacactgagacagacggtt

SEQ ID NO: 207230 - DNA, 25 bp, Canis familiaris
ttcgtgaggtcgggaacactaggtc

SEQ ID NO: 207231 - DNA, 25 bp, Canis familiaris
ttgagaaggccctgaccactatggt

SEQ ID NO: 207232 - DNA, 25 bp, Canis familiaris
ttgaaaacgccttgcaaacttggaa

SEQ ID NO: 207233 - DNA, 25 bp, Canis familiaris
ttgccaactccctgaaatcctggaa

SEQ ID NO: 207234 - DNA, 25 bp, Canis familiaris
ttccgcttcccaggaggaactgcaa

SEQ ID NO: 207235 - DNA, 25 bp, Canis familiaris
ttcccattccctgaagtcagctgac

SEQ ID NO: 207236 - DNA, 25 bp, Canis familiaris
ttcccaagccccgaagtgaatgttc

SEQ ID NO: 207237 - DNA, 25 bp, Canis familiaris
ttgcccaacctacaggaagcttgtc

SEQ ID NO: 207238 - DNA, 25 bp, Canis familiaris
ttcccacaagtcctatggaagatag

SEQ ID NO: 207239 - DNA, 25 bp, Canis familiaris
ttcccaccctggcatgccagagaag

SEQ ID NO: 207240 - DNA, 25 bp, Canis familiaris
ttccagccagtcctaagcacagaga

SEQ ID NO: 207241 - DNA, 25 bp, Canis familiaris
ttccaccattagcagagccaacaaa

SEQ ID NO: 207242 - DNA, 25 bp, Canis familiaris
ttccaccaaggtaaccaatccaact

SEQ ID NO: 207243 - DNA, 25 bp, Canis familiaris
ttcccctgaaataacaacaccactc

SEQ ID NO: 207244 - DNA, 25 bp, Canis familiaris
ttggccctgactgcttagacaccaa

SEQ ID NO: 207245 - DNA, 25 bp, Canis familiaris
ttggctccaactgcagattttccca

SEQ ID NO: 207246 - DNA, 25 bp, Canis familiaris
ttcccagctactgctggtttctcca

SEQ ID NO: 207247 - DNA, 25 bp, Canis familiaris
ttcccagagagagcctggttctccc

SEQ ID NO: 207248 - DNA, 25 bp, Canis familiaris
ttcggcaaggacgtgcgcgtgtcca

SEQ ID NO: 207249 - DNA, 25 bp, Canis familiaris
ttcccagaggaagtgacatttgcgc

SEQ ID NO: 207250 - DNA, 25 bp, Canis familiaris
ttcgccaagcgcaagagacccgcgc

SEQ ID NO: 207251 - DNA, 25 bp, Canis familiaris
ttctggaagccttggagcccagcac

SEQ ID NO: 207252 - DNA, 25 bp, Canis familiaris
ttgcaaaagagcctgggcccaagcc

SEQ ID NO: 207253 - DNA, 25 bp, Canis familiaris
ttccaaaatggtcgtaaccactccg

SEQ ID NO: 207254 - DNA, 25 bp, Canis familiaris
ttccactagcatatggggaccccac

SEQ ID NO: 207255 - DNA, 25 bp, Canis familiaris
ttgacctgcaactggaggaccacct

SEQ ID NO: 207256 - DNA, 25 bp, Canis familiaris
ttgacactgggctgccaaatccacc

SEQ ID NO: 207257 - DNA, 25 bp, Canis familiaris
ttcccatggagctggtccactccaa

SEQ ID NO: 207258 - DNA, 25 bp, Canis familiaris
ttccgcgaggaccagatctaccgca

SEQ ID NO: 207259 - DNA, 25 bp, Canis familiaris
ttcgcccatggagggcactatccga

SEQ ID NO: 207260 - DNA, 25 bp, Canis familiaris
ttccctctgaatggtatcttcctga

SEQ ID NO: 207261 - DNA, 25 bp, Canis familiaris
ttcccctgcgacaattttcctaggt

SEQ ID NO: 207262 - DNA, 25 bp, Canis familiaris
ttctggttccacattagtctctagc

SEQ ID NO: 207263 - DNA, 25 bp, Canis familiaris
ttccgttctcaatttgcagctgtct

SEQ ID NO: 207264 - DNA, 25 bp, Canis familiaris
ttcgcaacttcttctatggcagaca

SEQ ID NO: 207265 - DNA, 25 bp, Canis familiaris
ttcccaccttgtgatgtcaacaccc

SEQ ID NO: 207266 - DNA, 25 bp, Canis familiaris
ttcccacgttgagcagccaaagcag

SEQ ID NO: 207267 - DNA, 25 bp, Canis familiaris
ttcgccagcgtggaggccgagaacg

SEQ ID NO: 207268 - DNA, 25 bp, Canis familiaris
ttcggcacgagcgctgccgtaagga

SEQ ID NO: 207269 - DNA, 25 bp, Canis familiaris
ttcggcacgagaattccgataacga

SEQ ID NO: 207270 - DNA, 25 bp, Canis familiaris
ttcggcacgagctccgacaaaggtc

SEQ ID NO: 207271 - DNA, 25 bp, Canis familiaris
ttcggcacgagcagccatgcaaaag

SEQ ID NO: 207272 - DNA, 25 bp, Canis familiaris
ttcccacaggctgcactgacataac

SEQ ID NO: 207273 - DNA, 25 bp, Canis familiaris
ttcctagaggcagtacagactattg

SEQ ID NO: 207274 - DNA, 25 bp, Canis familiaris
ttcctatggggcaagcagacgatca

SEQ ID NO: 207275 - DNA, 25 bp, Canis familiaris
ttccttccaacaacaatttaagcaa

SEQ ID NO: 207276 - DNA, 25 bp, Canis familiaris
ttccccccaataaatgtgctagagc

SEQ ID NO: 207277 - DNA, 25 bp, Canis familiaris
ttccctccccagaatcatgtttggc

SEQ ID NO: 207278 - DNA, 25 bp, Canis familiaris
ttccccaacatccttcagttgtggc

SEQ ID NO: 207279 - DNA, 25 bp, Canis familiaris
ttgcactccaattcgtcatcagggc

SEQ ID NO: 207280 - DNA, 25 bp, Canis familiaris
ttgacttagcatttctagagggccc

SEQ ID NO: 207281 - DNA, 25 bp, Canis familiaris
ttgccctggcttttaggggcactat

SEQ ID NO: 207282 - DNA, 25 bp, Canis familiaris
ttgcttcagttgtgccagggtgact

SEQ ID NO: 207283 - DNA, 25 bp, Canis familiaris
ttcgtcccacacccagggtgactat

SEQ ID NO: 207284 - DNA, 25 bp, Canis familiaris
ttcccacccacacagatggaactaa

SEQ ID NO: 207285 - DNA, 25 bp, Canis familiaris
ttcccccacacacgagtgaatacct

SEQ ID NO: 207286 - DNA, 25 bp, Canis familiaris
ttgaccccaaccaaggatgcaacct

SEQ ID NO: 207287 - DNA, 25 bp, Canis familiaris
ttgatgcggccattgctcaagcaaa

SEQ ID NO: 207288 - DNA, 25 bp, Canis familiaris
ttcctggccaatccaaataacaatt

SEQ ID NO: 207289 - DNA, 25 bp, Canis familiaris
ttccatcccaaccaaagctaaatct

SEQ ID NO: 207290 - DNA, 25 bp, Canis familiaris
ttccccttacacttcatctaaagtg

SEQ ID NO: 207291 - DNA, 25 bp, Canis familiaris
ttccccttctattcctgaaacagtg

SEQ ID NO: 207292 - DNA, 25 bp, Canis familiaris
ttcctccctgtcaagcactaaaagt

SEQ ID NO: 207293 - DNA, 25 bp, Canis familiaris
ttccatctccagcaagcttataatc

SEQ ID NO: 207294 - DNA, 25 bp, Canis familiaris
ttcccatgaatgtcaatcttttatc

SEQ ID NO: 207295 - DNA, 25 bp, Canis familiaris
ttccctgacttctctatttattcgt

SEQ ID NO: 207296 - DNA, 25 bp, Canis familiaris
ttccgctggctttcccagtatattg

SEQ ID NO: 207297 - DNA, 25 bp, Canis familiaris
ttcccttgtattgctcagtattcaa

SEQ ID NO: 207298 - DNA, 25 bp, Canis familiaris
ttcctttcgttcgtaccattcaaga

SEQ ID NO: 207299 - DNA, 25 bp, Canis familiaris
ttgtcttaggttgtgatcctctaga

SEQ ID NO: 207300 - DNA, 25 bp, Canis familiaris
ttgtttcctttgcttcccaaagtca

SEQ ID NO: 207301 - DNA, 25 bp, Canis familiaris
ttgttactctttcaccggtaggtat

SEQ ID NO: 207302 - DNA, 25 bp, Canis familiaris
ttgtcaagccttgtaactggtgggt

SEQ ID NO: 207303 - DNA, 25 bp, Canis familiaris
ttccaactctgtgtaacgtttctga

SEQ ID NO: 207304 - DNA, 25 bp, Canis familiaris
ttgtagcacctgtttacacgttttc

SEQ ID NO: 207305 - DNA, 25 bp, Canis familiaris
ttggtcccttataaagggtatatct

SEQ ID NO: 207306 - DNA, 25 bp, Canis familiaris
ttgcccccctgatacagttgtagac

SEQ ID NO: 207307 - DNA, 25 bp, Canis familiaris
ttggcgtcccgtttagtggacgaca

SEQ ID NO: 207308 - DNA, 25 bp, Canis familiaris
ttgaagatcccctgatcgttaccca

SEQ ID NO: 207309 - DNA, 25 bp, Canis familiaris
ttgtaacccctgcggttattccagc

SEQ ID NO: 207310 - DNA, 25 bp, Canis familiaris
ttgtgttccctagcctgttaaaggc

SEQ ID NO: 207311 - DNA, 25 bp, Canis familiaris
ttgtcccacctaccggtgaaaagtg

SEQ ID NO: 207312 - DNA, 25 bp, Canis familiaris
ttccccagctcttcacttagaatga

SEQ ID NO: 207313 - DNA, 25 bp, Canis familiaris
ttcccaagcctctgcattcaaaaac

SEQ ID NO: 207314 - DNA, 25 bp, Canis familiaris
ttccagcagggtctcttcagaaata

SEQ ID NO: 207315 - DNA, 25 bp, Canis familiaris
ttcctcaaggtagtctatgccctta

SEQ ID NO: 207316 - DNA, 25 bp, Canis familiaris
ttcctacacgtagtttctccaacag

SEQ ID NO: 207317 - DNA, 25 bp, Canis familiaris
ttcctagctcgttctttgggagaaa

SEQ ID NO: 207318 - DNA, 25 bp, Canis familiaris
ttcctggccgttctttggtgagaaa

SEQ ID NO: 207319 - DNA, 25 bp, Canis familiaris
ttcctgcccaataggctcttctaaa

SEQ ID NO: 207320 - DNA, 25 bp, Canis familiaris
ttccatccgagtggggcttcgaaac

SEQ ID NO: 207321 - DNA, 25 bp, Canis familiaris
ttccatcctaagggacccagccaac

SEQ ID NO: 207322 - DNA, 25 bp, Canis familiaris
ttccagccataaggaatgggaccaa

SEQ ID NO: 207323 - DNA, 25 bp, Canis familiaris
ttgccagccgagagttctgttccaa

SEQ ID NO: 207324 - DNA, 25 bp, Canis familiaris
ttggcaccagagatggtcaaagtaa

SEQ ID NO: 207325 - DNA, 25 bp, Canis familiaris
ttgagccctggttgtacaagacttg

SEQ ID NO: 207326 - DNA, 25 bp, Canis familiaris
ttgagcccggtgttccagggcaacc

SEQ ID NO: 207327 - DNA, 25 bp, Canis familiaris
ttgaagccggtgcaaagggagactg

SEQ ID NO: 207328 - DNA, 25 bp, Canis familiaris
ttgggccggttgaacgtgcgagcct

SEQ ID NO: 207329 - DNA, 25 bp, Canis familiaris
ttcgtgagggcctcatcgtgggctt

SEQ ID NO: 207330 - DNA, 25 bp, Canis familiaris
ttcgtgacggccaattcggattgtt

SEQ ID NO: 207331 - DNA, 25 bp, Canis familiaris
ttgcggtcggcatcttcagcaatgt

SEQ ID NO: 207332 - DNA, 25 bp, Canis familiaris
ttcgtgctctgagtactggagagaa

SEQ ID NO: 207333 - DNA, 25 bp, Canis familiaris
ttcgctccagcagacgcagagatgc

SEQ ID NO: 207334 - DNA, 25 bp, Canis familiaris
ttcgctacacacaaatgccacatgt

SEQ ID NO: 207335 - DNA, 25 bp, Canis familiaris
ttcgctgccagcaattagcgccagt

SEQ ID NO: 207336 - DNA, 25 bp, Canis familiaris
ttcgccgcacatcatcagcgcgcaa

SEQ ID NO: 207337 - DNA, 25 bp, Canis familiaris
ttccctacaggattgcggagaagtt

SEQ ID NO: 207338 - DNA, 25 bp, Canis familiaris
ttccctcaaggttccagcaagttct

SEQ ID NO: 207339 - DNA, 25 bp, Canis familiaris
ttccttccgcggttcagtagttgtt

SEQ ID NO: 207340 - DNA, 25 bp, Canis familiaris
ttccagcaccgtgcttggctttttt

SEQ ID NO: 207341 - DNA, 25 bp, Canis familiaris
ttcccccatgttcattcattttgtt

SEQ ID NO: 207342 - DNA, 25 bp, Canis familiaris
ttccctcttgttcagtatctttagt

SEQ ID NO: 207343 - DNA, 25 bp, Canis familiaris
ttccgcctagttacctatctttgaa

SEQ ID NO: 207344 - DNA, 25 bp, Canis familiaris
ttcccagtcaggtttctatttctaa

SEQ ID NO: 207345 - DNA, 25 bp, Canis familiaris
ttcccattcgtgttttattttcttg

SEQ ID NO: 207346 - DNA, 25 bp, Canis familiaris
ttcccttctgtgtctaaattttcca

SEQ ID NO: 207347 - DNA, 25 bp, Canis familiaris
ttgcaactctcctctaaatctaaaa

SEQ ID NO: 207348 - DNA, 25 bp, Canis familiaris
ttgctagctccctcaaggacaacac

SEQ ID NO: 207349 - DNA, 25 bp, Canis familiaris
ttctggctcacctcacagaggacag

SEQ ID NO: 207350 - DNA, 25 bp, Canis familiaris
ttcgggccatgctccagagggaggc

SEQ ID NO: 207351 - DNA, 25 bp, Canis familiaris
ttgagggaagcatctcgggggagag

SEQ ID NO: 207352 - DNA, 25 bp, Canis familiaris
ttgcgggggcaagacggtgctggac

SEQ ID NO: 207353 - DNA, 25 bp, Canis familiaris
ttggaagggcaagttctggtgccag

SEQ ID NO: 207354 - DNA, 25 bp, Canis familiaris
ttgccaaggggacgttgtaccagga

SEQ ID NO: 207355 - DNA, 25 bp, Canis familiaris
ttcctaggtcgactagtccactagt

SEQ ID NO: 207356 - DNA, 25 bp, Canis familiaris
ttccttggataacagtctatataca

SEQ ID NO: 207357 - DNA, 25 bp, Canis familiaris
ttgccactggcaaacataatcttgt

SEQ ID NO: 207358 - DNA, 25 bp, Canis familiaris
ttccagcctgcaaagatctatcctc

SEQ ID NO: 207359 - DNA, 25 bp, Canis familiaris
ttccgcctcagaatcagtgatgccc

SEQ ID NO: 207360 - DNA, 25 bp, Canis familiaris
ttccacctagtccagcaatggcagc

SEQ ID NO: 207361 - DNA, 25 bp, Canis familiaris
ttccctctaggcctcagatgtgagg

SEQ ID NO: 207362 - DNA, 25 bp, Canis familiaris
ttccccattgtcctcacggatggga

SEQ ID NO: 207363 - DNA, 25 bp, Canis familiaris
ttccaacgcgtcatacaagtgtaga

SEQ ID NO: 207364 - DNA, 25 bp, Canis familiaris
ttccaagaggtggtggcacagcggg

SEQ ID NO: 207365 - DNA, 25 bp, Canis familiaris
ttcccacaggctgtggcaaggtcat

SEQ ID NO: 207366 - DNA, 25 bp, Canis familiaris
ttcctcacggccattgacaggtaca

SEQ ID NO: 207367 - DNA, 25 bp, Canis familiaris
ttgcagccaacgtcgtcgactggta

SEQ ID NO: 207368 - DNA, 25 bp, Canis familiaris
ttgacccatcagtcggtccgtgaga

SEQ ID NO: 207369 - DNA, 25 bp, Canis familiaris
ttccgctatcagacagacccgtgga

SEQ ID NO: 207370 - DNA, 25 bp, Canis familiaris
ttcggcattcgttatacggaagatg

SEQ ID NO: 207371 - DNA, 25 bp, Canis familiaris
ttcccattcgctttaccaaaatctt

SEQ ID NO: 207372 - DNA, 25 bp, Canis familiaris
ttcccaaccttgacaccaaactatt

SEQ ID NO: 207373 - DNA, 25 bp, Canis familiaris
ttccatgagacactttaccagaagg

SEQ ID NO: 207374 - DNA, 25 bp, Canis familiaris
ttcccaggatgcatgtcctcagagg

SEQ ID NO: 207375 - DNA, 25 bp, Canis familiaris
ttcccggtcatcatcgcgaagaaaa

SEQ ID NO: 207376 - DNA, 25 bp, Canis familiaris
ttcgttcttatcactgcggagaaaa

SEQ ID NO: 207377 - DNA, 25 bp, Canis familiaris
ttccttcctgtcattggccagaaaa

SEQ ID NO: 207378 - DNA, 25 bp, Canis familiaris
ttcccacttgtggttccaacagaat

SEQ ID NO: 207379 - DNA, 25 bp, Canis familiaris
ttcgccgctattctgttctagcaga

SEQ ID NO: 207380 - DNA, 25 bp, Canis familiaris
ttcctggtgttcctttcaccatgaa

SEQ ID NO: 207381 - DNA, 25 bp, Canis familiaris
ttcctgggtctcctgtttcagagaa

SEQ ID NO: 207382 - DNA, 25 bp, Canis familiaris
ttcctgaggactgagtttccgaacc

SEQ ID NO: 207383 - DNA, 25 bp, Canis familiaris
ttcctcaggactccctgttgacgaa

SEQ ID NO: 207384 - DNA, 25 bp, Canis familiaris
ttgcagctatggttggtttggatta

SEQ ID NO: 207385 - DNA, 25 bp, Canis familiaris
ttgcactcatggtgcgacctggacc

SEQ ID NO: 207386 - DNA, 25 bp, Canis familiaris
ttccatcatgaagtgtgacgttgac

SEQ ID NO: 207387 - DNA, 25 bp, Canis familiaris
ttccttctagtgaaccattcctttt

SEQ ID NO: 207388 - DNA, 25 bp, Canis familiaris
ttcctgtaagttcccttccataatt

SEQ ID NO: 207389 - DNA, 25 bp, Canis familiaris
ttcccttggcttgacttatcattat

SEQ ID NO: 207390 - DNA, 25 bp, Canis familiaris
ttgccctttgcctgaattttaatga

SEQ ID NO: 207391 - DNA, 25 bp, Canis familiaris
ttccattctgtctcaaattttaagt

SEQ ID NO: 207392 - DNA, 25 bp, Canis familiaris
ttcctttgcccaccaagatttttgt

SEQ ID NO: 207393 - DNA, 25 bp, Canis familiaris
ttccatattcccagcggatgggttg

SEQ ID NO: 207394 - DNA, 25 bp, Canis familiaris
ttccgttccacaagctgctgtgggg

SEQ ID NO: 207395 - DNA, 25 bp, Canis familiaris
ttccagtttctcaagaaggaaggtc

SEQ ID NO: 207396 - DNA, 25 bp, Canis familiaris
ttccctgatcccataatggaagggt

SEQ ID NO: 207397 - DNA, 25 bp, Canis familiaris
ttcccctccctatctgaaagtaggg

SEQ ID NO: 207398 - DNA, 25 bp, Canis familiaris
ttcccgtgggcttcactaaggtggt

SEQ ID NO: 207399 - DNA, 25 bp, Canis familiaris
ttcccggcaggttaaaatggtgtct

SEQ ID NO: 207400 - DNA, 25 bp, Canis familiaris
ttcccaggggttggaaagctggcca

SEQ ID NO: 207401 - DNA, 25 bp, Canis familiaris
ttcccaccccttggcaacagggaag

SEQ ID NO: 207402 - DNA, 25 bp, Canis familiaris
ttcctcaccctcgttgaacgaaaag

SEQ ID NO: 207403 - DNA, 25 bp, Canis familiaris
ttccccccctgcttgaaagaataag

SEQ ID NO: 207404 - DNA, 25 bp, Canis familiaris
ttcctccccaccttgtcaaggtgtc

SEQ ID NO: 207405 - DNA, 25 bp, Canis familiaris
ttccatcccaaggctttgaaggatg

SEQ ID NO: 207406 - DNA, 25 bp, Canis familiaris
ttccccccatgtgtgtaagctcatg

SEQ ID NO: 207407 - DNA, 25 bp, Canis familiaris
ttcctccaccatttattagcactca

SEQ ID NO: 207408 - DNA, 25 bp, Canis familiaris
ttcccgattcattgagttacacatc

SEQ ID NO: 207409 - DNA, 25 bp, Canis familiaris
ttcccgggatgtggctcataaccca

SEQ ID NO: 207410 - DNA, 25 bp, Canis familiaris
ttccctgggactgctgagaatggcc

SEQ ID NO: 207411 - DNA, 25 bp, Canis familiaris
ttcccgggtggccatcaggatggcc

SEQ ID NO: 207412 - DNA, 25 bp, Canis familiaris
ttccgcgtcgggctagggagatccc

SEQ ID NO: 207413 - DNA, 25 bp, Canis familiaris
ttcctcccgttggtagttgagacgc

SEQ ID NO: 207414 - DNA, 25 bp, Canis familiaris
ttccttccttgggttattgaaccat

SEQ ID NO: 207415 - DNA, 25 bp, Canis familiaris
ttccttcacatcctgtgtttctagg

SEQ ID NO: 207416 - DNA, 25 bp, Canis familiaris
ttcctgtctccactagtcttaaatc

SEQ ID NO: 207417 - DNA, 25 bp, Canis familiaris
ttcctggctccaaaccttaatactt

SEQ ID NO: 207418 - DNA, 25 bp, Canis familiaris
ttcctgcccaaggacctttaggctt

SEQ ID NO: 207419 - DNA, 25 bp, Canis familiaris
ttccccaattcgccctttatgaatt

SEQ ID NO: 207420 - DNA, 25 bp, Canis familiaris
ttccacactattctctttctaaaat

SEQ ID NO: 207421 - DNA, 25 bp, Canis familiaris
ttccagacttgttccttgcactgaa

SEQ ID NO: 207422 - DNA, 25 bp, Canis familiaris
ttccagacctgttcctgagagctca

SEQ ID NO: 207423 - DNA, 25 bp, Canis familiaris
ttcctgtcttttgtgcatggctggc

SEQ ID NO: 207424 - DNA, 25 bp, Canis familiaris
ttcgcttctttagttgacagcagta

SEQ ID NO: 207425 - DNA, 25 bp, Canis familiaris
ttcgctcctgctgcatttgtacaat

SEQ ID NO: 207426 - DNA, 25 bp, Canis familiaris
ttccatcctctgaatatttccagta

SEQ ID NO: 207427 - DNA, 25 bp, Canis familiaris
ttccatcccatcatcttggtactac

SEQ ID NO: 207428 - DNA, 25 bp, Canis familiaris
ttccaccacactgttgtgtagccca

SEQ ID NO: 207429 - DNA, 25 bp, Canis familiaris
ttcccacatcctttgttctagttaa

SEQ ID NO: 207430 - DNA, 25 bp, Canis familiaris
ttcccacacgtggtgatgttacatt

SEQ ID NO: 207431 - DNA, 25 bp, Canis familiaris
ttcccagccaggtttgtatccagtc

SEQ ID NO: 207432 - DNA, 25 bp, Canis familiaris
ttcctaccctgaattgatataagca

SEQ ID NO: 207433 - DNA, 25 bp, Canis familiaris
ttcctcaggcctactgggccaagca

SEQ ID NO: 207434 - DNA, 25 bp, Canis familiaris
ttcccatgaccccatgagggctaaa

SEQ ID NO: 207435 - DNA, 25 bp, Canis familiaris
ttccctcccagaattgcgggagaag

SEQ ID NO: 207436 - DNA, 25 bp, Canis familiaris
ttcccctccagaattgtcggagaaa

SEQ ID NO: 207437 - DNA, 25 bp, Canis familiaris
ttcccctgccagattggcggagaag

SEQ ID NO: 207438 - DNA, 25 bp, Canis familiaris
ttcccctgccagtggtggttagagc

SEQ ID NO: 207439 - DNA, 25 bp, Canis familiaris
ttcccttctgagtggtggccttata

SEQ ID NO: 207440 - DNA, 25 bp, Canis familiaris
ttcgccttctgatcttaggcttaat

SEQ ID NO: 207441 - DNA, 25 bp, Canis familiaris
ttcccttggaaaaatggcttatcgt

SEQ ID NO: 207442 - DNA, 25 bp, Canis familiaris
ttcccagtgtctgaaaggtaattgt

SEQ ID NO: 207443 - DNA, 25 bp, Canis familiaris
ttcccagcctctggaaggtgctgaa

SEQ ID NO: 207444 - DNA, 25 bp, Canis familiaris
ttgcccatggccaggtcagtgtgga

SEQ ID NO: 207445 - DNA, 25 bp, Canis familiaris
ttccctgggcattcgtgtggtgaag

SEQ ID NO: 207446 - DNA, 25 bp, Canis familiaris
ttcccattgtttctgtagctgtgtg

SEQ ID NO: 207447 - DNA, 25 bp, Canis familiaris
ttccatgttcttgtttcgcgattgt

SEQ ID NO: 207448 - DNA, 25 bp, Canis familiaris
ttcctgactctcagtatcctggacc

SEQ ID NO: 207449 - DNA, 25 bp, Canis familiaris
ttcctgactctcagtatcctggacc

SEQ ID NO: 207450 - DNA, 25 bp, Canis familiaris
ttcctggccttaccacttagagcca

SEQ ID NO: 207451 - DNA, 25 bp, Canis familiaris
ttccgtgcacggattccaagagcct

SEQ ID NO: 207452 - DNA, 25 bp, Canis familiaris
ttccgctgcaggctttgcctgaagc

SEQ ID NO: 207453 - DNA, 25 bp, Canis familiaris
ttccgctctgttctggttgaagcaa

SEQ ID NO: 207454 - DNA, 25 bp, Canis familiaris
ttccccatgttatgcggtaaccacc

SEQ ID NO: 207455 - DNA, 25 bp, Canis familiaris
ttgccccagttttgggaactcctct

SEQ ID NO: 207456 - DNA, 25 bp, Canis familiaris
ttccgtctggtttgaaaactccaat

SEQ ID NO: 207457 - DNA, 25 bp, Canis familiaris
ttccttccttagttaatttccaatg

SEQ ID NO: 207458 - DNA, 25 bp, Canis familiaris
ttccttctcttagccattttcaaaa

SEQ ID NO: 207459 - DNA, 25 bp, Canis familiaris
ttccctgttaatctcatttttaaca

SEQ ID NO: 207460 - DNA, 25 bp, Canis familiaris
ttccctctctttatttttctaatat

SEQ ID NO: 207461 - DNA, 25 bp, Canis familiaris
ttcccttgtaccagttgtgtttaat

SEQ ID NO: 207462 - DNA, 25 bp, Canis familiaris
ttcgtcattaaccttgtttgcactt

SEQ ID NO: 207463 - DNA, 25 bp, Canis familiaris
ttcgtctataaactatctttttctt

SEQ ID NO: 207464 - DNA, 25 bp, Canis familiaris
ttcccttaacactacagcctatttt

SEQ ID NO: 207465 - DNA, 25 bp, Canis familiaris
ttccacttaactggcctgccatatt

SEQ ID NO: 207466 - DNA, 25 bp, Canis familiaris
ttccacttaactggcctgccatatt

SEQ ID NO: 207467 - DNA, 25 bp, Canis familiaris
ttcccgctgaatagctcctacaatc

SEQ ID NO: 207468 - DNA, 25 bp, Canis familiaris
ttcctctctaagactactaatcatc

SEQ ID NO: 207469 - DNA, 25 bp, Canis familiaris
ttcctctcattaccttcatttttgg

SEQ ID NO: 207470 - DNA, 25 bp, Canis familiaris
ttccactaccagccttatttgttta

SEQ ID NO: 207471 - DNA, 25 bp, Canis familiaris
ttccttctcgccctaattattagta

SEQ ID NO: 207472 - DNA, 25 bp, Canis familiaris
ttggcttccaggggaaagttcactg

SEQ ID NO: 207473 - DNA, 25 bp, Canis familiaris
ttcgcttccggtggaacagcttcaa

SEQ ID NO: 207474 - DNA, 25 bp, Canis familiaris
ttcccttgggctgcaacatgcaatc

SEQ ID NO: 207475 - DNA, 25 bp, Canis familiaris
ttcgcctcagggggggcatgcagat

SEQ ID NO: 207476 - DNA, 25 bp, Canis familiaris
ttggcccgaagctgcaggatgctga

SEQ ID NO: 207477 - DNA, 25 bp, Canis familiaris
ttggcctcgagactgaacaagtgaa

SEQ ID NO: 207478 - DNA, 25 bp, Canis familiaris
ttgaggccccgtacacgagtgaaga

SEQ ID NO: 207479 - DNA, 25 bp, Canis familiaris
ttgcggttcctgaactggatggaaa

SEQ ID NO: 207480 - DNA, 25 bp, Canis familiaris
ttcctgtctgcctcactggaaaata

SEQ ID NO: 207481 - DNA, 25 bp, Canis familiaris
ttccgttgcagctgagcgatataaa

SEQ ID NO: 207482 - DNA, 25 bp, Canis familiaris
ttgccttcgacattagccatataac

SEQ ID NO: 207483 - DNA, 25 bp, Canis familiaris
ttccctggtcatacagccacaaacc

SEQ ID NO: 207484 - DNA, 25 bp, Canis familiaris
ttccctgttgctggcactcagaaga

SEQ ID NO: 207485 - DNA, 25 bp, Canis familiaris
ttccctggctctggcaacaaagctg

SEQ ID NO: 207486 - DNA, 25 bp, Canis familiaris
ttccctgcagccactgtacaagatg

SEQ ID NO: 207487 - DNA, 25 bp, Canis familiaris
ttccgtgtctcgccatgtgaagaat

SEQ ID NO: 207488 - DNA, 25 bp, Canis familiaris
ttccactgacacccagatccagaat

SEQ ID NO: 207489 - DNA, 25 bp, Canis familiaris
ttgccagacccaccagtagagagcg

SEQ ID NO: 207490 - DNA, 25 bp, Canis familiaris
ttgccaccctacagggaactgctgg

SEQ ID NO: 207491 - DNA, 25 bp, Canis familiaris
ttgccaacctttcagcaaaatgtgg

SEQ ID NO: 207492 - DNA, 25 bp, Canis familiaris
ttccaacccttgaaggaaaattgat

SEQ ID NO: 207493 - DNA, 25 bp, Canis familiaris
ttccaacaccttcaggagttgtctt

SEQ ID NO: 207494 - DNA, 25 bp, Canis familiaris
ttccatccatctactaaaatttttt

SEQ ID NO: 207495 - DNA, 25 bp, Canis familiaris
ttcccccatctttataatactctct

SEQ ID NO: 207496 - DNA, 25 bp, Canis familiaris
ttcctagccctgttataaactgccc

SEQ ID NO: 207497 - DNA, 25 bp, Canis familiaris
ttcccgtgttgaaataagcctccct

SEQ ID NO: 207498 - DNA, 25 bp, Canis familiaris
ttcccgggataattaatcccttcat

SEQ ID NO: 207499 - DNA, 25 bp, Canis familiaris
ttccctgtggtcaaagtatcctctt

SEQ ID NO: 207500 - DNA, 25 bp, Canis familiaris
ttccacagttgtaaatgctagtttt

SEQ ID NO: 207501 - DNA, 25 bp, Canis familiaris
ttccctttgaatagtccactctttc

SEQ ID NO: 207502 - DNA, 25 bp, Canis familiaris
ttccgcttgtaattctccaggttat

SEQ ID NO: 207503 - DNA, 25 bp, Canis familiaris
ttccctttgatagtgtctcagtgtg

SEQ ID NO: 207504 - DNA, 25 bp, Canis familiaris
ttcctgctctggcaggtccaggcgg

SEQ ID NO: 207505 - DNA, 25 bp, Canis familiaris
ttcctgctgcagcgaggggagggtg

SEQ ID NO: 207506 - DNA, 25 bp, Canis familiaris
ttcgcctgcgtggacgggatggggc

SEQ ID NO: 207507 - DNA, 25 bp, Canis familiaris
ttccccggaacgggagagcggcgcg

SEQ ID NO: 207508 - DNA, 25 bp, Canis familiaris
ttcctctcggaatgacgcaagcatg

SEQ ID NO: 207509 - DNA, 25 bp, Canis familiaris
ttccaccctaattagcagccaatcc

SEQ ID NO: 207510 - DNA, 25 bp, Canis familiaris
ttccaagccttattcagtgacaatc

SEQ ID NO: 207511 - DNA, 25 bp, Canis familiaris
ttcgaagcacgttgcacgtgaacac

SEQ ID NO: 207512 - DNA, 25 bp, Canis familiaris
ttccactctagttcttttaccaagg

SEQ ID NO: 207513 - DNA, 25 bp, Canis familiaris
ttcccttttttgactgaaccagact

SEQ ID NO: 207514 - DNA, 25 bp, Canis familiaris
ttcctgtattccatctaaaccaact

SEQ ID NO: 207515 - DNA, 25 bp, Canis familiaris
ttcctccatttttctcaaatctgct

SEQ ID NO: 207516 - DNA, 25 bp, Canis familiaris
ttcctttcttttacaaattgtgctg

SEQ ID NO: 207517 - DNA, 25 bp, Canis familiaris
ttccattttttgcaacttctctgtg

SEQ ID NO: 207518 - DNA, 25 bp, Canis familiaris
ttgcctttatctttgggtttgctat

SEQ ID NO: 207519 - DNA, 25 bp, Canis familiaris
ttcctatttctctttctttgtgtga

SEQ ID NO: 207520 - DNA, 25 bp, Canis familiaris
ttcctttgtcgaatgtcttccgtac

SEQ ID NO: 207521 - DNA, 25 bp, Canis familiaris
ttccttaccagtatttctgcctcac

SEQ ID NO: 207522 - DNA, 25 bp, Canis familiaris
ttcctatactggttattctgtcctc

SEQ ID NO: 207523 - DNA, 25 bp, Canis familiaris
ttccttgactgttaatttggctgct

SEQ ID NO: 207524 - DNA, 25 bp, Canis familiaris
ttcctggcttgtggtttggagctct

SEQ ID NO: 207525 - DNA, 25 bp, Canis familiaris
ttccggttgcatctggggagcactc

SEQ ID NO: 207526 - DNA, 25 bp, Canis familiaris
ttccggggctgggtggggcagccct

SEQ ID NO: 207527 - DNA, 25 bp, Canis familiaris
ttgggaggggggagctgagcacgac

SEQ ID NO: 207528 - DNA, 25 bp, Canis familiaris
ttgggctcaggctggaggtcagcaa

SEQ ID NO: 207529 - DNA, 25 bp, Canis familiaris
ttgggtcggaagccggcattggcac

SEQ ID NO: 207530 - DNA, 25 bp, Canis familiaris
ttgtttctggtcgcgagattaacta

SEQ ID NO: 207531 - DNA, 25 bp, Canis familiaris
ttgttctctggttcaaatcattaca

SEQ ID NO: 207532 - DNA, 25 bp, Canis familiaris
ttgttcttctgccaccaaaatgcca

SEQ ID NO: 207533 - DNA, 25 bp, Canis familiaris
ttgttttcacaaccttcaaccaaca

SEQ ID NO: 207534 - DNA, 25 bp, Canis familiaris
ttgtttccattatctgagactccaa

SEQ ID NO: 207535 - DNA, 25 bp, Canis familiaris
ttgctgttgcctaattcaagcctat

SEQ ID NO: 207536 - DNA, 25 bp, Canis familiaris
ttgagttccggtacaagctcctgat

SEQ ID NO: 207537 - DNA, 25 bp, Canis familiaris
ttgagaccccgttgcaacgttgaca

SEQ ID NO: 207538 - DNA, 25 bp, Canis familiaris
ttgaggtacccttgcctcagttagc

SEQ ID NO: 207539 - DNA, 25 bp, Canis familiaris
ttgagtgtcccttaaccatggtggc

SEQ ID NO: 207540 - DNA, 25 bp, Canis familiaris
ttgacgcctctttacaggggtggca

SEQ ID NO: 207541 - DNA, 25 bp, Canis familiaris
ttggcccctttccaggaaggtgcca

SEQ ID NO: 207542 - DNA, 25 bp, Canis familiaris
ttcgacccttgcccagagcaagggg

SEQ ID NO: 207543 - DNA, 25 bp, Canis familiaris
ttcgacgccttcatccagcaaggcg

SEQ ID NO: 207544 - DNA, 25 bp, Canis familiaris
ttccaaccttttcagcacagctgga

SEQ ID NO: 207545 - DNA, 25 bp, Canis familiaris
ttcccacttattttagcttgtggag

SEQ ID NO: 207546 - DNA, 25 bp, Canis familiaris
ttcccatcttttactagcttgacgt

SEQ ID NO: 207547 - DNA, 25 bp, Canis familiaris
ttcccactccttagaagctatccag

SEQ ID NO: 207548 - DNA, 25 bp, Canis familiaris
ttccgcctcctgaagcgaataaagg

SEQ ID NO: 207549 - DNA, 25 bp, Canis familiaris
ttcccaccacagaagctgagaaaag

SEQ ID NO: 207550 - DNA, 25 bp, Canis familiaris
ttcctaacctgcaggcagaacctga

SEQ ID NO: 207551 - DNA, 25 bp, Canis familiaris
ttccagaacctggtgggtctccaac

SEQ ID NO: 207552 - DNA, 25 bp, Canis familiaris
ttccaattctgctctgggtctacaa

SEQ ID NO: 207553 - DNA, 25 bp, Canis familiaris
ttcctacggggcctggctcataaaa

SEQ ID NO: 207554 - DNA, 25 bp, Canis familiaris
ttccctccgaagctcagtcaaaaga

SEQ ID NO: 207555 - DNA, 25 bp, Canis familiaris
ttcctcccgaggcacagagacacgg

SEQ ID NO: 207556 - DNA, 25 bp, Canis familiaris
ttgcccccggttccatgagaagggg

SEQ ID NO: 207557 - DNA, 25 bp, Canis familiaris
ttccctccgacttccagaagcaggg

SEQ ID NO: 207558 - DNA, 25 bp, Canis familiaris
ttgcacaatccttcctccaggaagt

SEQ ID NO: 207559 - DNA, 25 bp, Canis familiaris
ttgctcgtccatccctcaagagaga

SEQ ID NO: 207560 - DNA, 25 bp, Canis familiaris
ttcccacctgccgtcatagaggcat

SEQ ID NO: 207561 - DNA, 25 bp, Canis familiaris
ttcccacacagcgctcagatggtat

SEQ ID NO: 207562 - DNA, 25 bp, Canis familiaris
ttcctcctcatagcctgtgagtcag

SEQ ID NO: 207563 - DNA, 25 bp, Canis familiaris
ttcctccttttaatgtgatggaatg

SEQ ID NO: 207564 - DNA, 25 bp, Canis familiaris
ttccctctttgtgcttcaggtgata

SEQ ID NO: 207565 - DNA, 25 bp, Canis familiaris
ttccccttggtgtctttagattgat

SEQ ID NO: 207566 - DNA, 25 bp, Canis familiaris
ttcctcttttgctctttaagtcttc

SEQ ID NO: 207567 - DNA, 25 bp, Canis familiaris
ttccctctttgctgctgtttaattt

SEQ ID NO: 207568 - DNA, 25 bp, Canis familiaris
ttccctgttctctgcatttagaagt

SEQ ID NO: 207569 - DNA, 25 bp, Canis familiaris
ttcctatgttatccgttatccacgt

SEQ ID NO: 207570 - DNA, 25 bp, Canis familiaris
ttcccatggtagctgttatctgaca

SEQ ID NO: 207571 - DNA, 25 bp, Canis familiaris
ttccctggccaggtgagttctgaca

SEQ ID NO: 207572 - DNA, 25 bp, Canis familiaris
ttccctgcctctggtaaccataaat

SEQ ID NO: 207573 - DNA, 25 bp, Canis familiaris
ttcccggcctcagacatacaaatga

SEQ ID NO: 207574 - DNA, 25 bp, Canis familiaris
ttcccaggaccagtcaacacggtga

SEQ ID NO: 207575 - DNA, 25 bp, Canis familiaris
ttccaactgacctccacagggatac

SEQ ID NO: 207576 - DNA, 25 bp, Canis familiaris
ttcctactcgctggacccaggaaac

SEQ ID NO: 207577 - DNA, 25 bp, Canis familiaris
ttcctactctcttagtccagtgaca

SEQ ID NO: 207578 - DNA, 25 bp, Canis familiaris
ttcctactgccataacatactgtaa

SEQ ID NO: 207579 - DNA, 25 bp, Canis familiaris
ttgcattaccaacaaataaataaga

SEQ ID NO: 207580 - DNA, 25 bp, Canis familiaris
ttgatcaaacaaaagcagaaactaa

SEQ ID NO: 207581 - DNA, 25 bp, Canis familiaris
ttgtgcattacaacttggagaaaga

SEQ ID NO: 207582 - DNA, 25 bp, Canis familiaris
ttgtcgtaaatctcgtgccgaattc

SEQ ID NO: 207583 - DNA, 25 bp, Canis familiaris
ttgccggtttactgtccatgttgtc

SEQ ID NO: 207584 - DNA, 25 bp, Canis familiaris
ttgccgaggctttcaaagacgtgtc

SEQ ID NO: 207585 - DNA, 25 bp, Canis familiaris
ttgaccaactcttcagagaacggat

SEQ ID NO: 207586 - DNA, 25 bp, Canis familiaris
ttcccatctctcttagaaaggcttt

SEQ ID NO: 207587 - DNA, 25 bp, Canis familiaris
ttcccatttattttcacattgcttt

SEQ ID NO: 207588 - DNA, 25 bp, Canis familiaris
ttccctgactgaattacatctttga

SEQ ID NO: 207589 - DNA, 25 bp, Canis familiaris
ttccctgaggaacaatgcgcttggc

SEQ ID NO: 207590 - DNA, 25 bp, Canis familiaris
ttcccgggatagtagctttgtggct

SEQ ID NO: 207591 - DNA, 25 bp, Canis familiaris
ttcccaaggccatgagctgtttggt

SEQ ID NO: 207592 - DNA, 25 bp, Canis familiaris
ttcccacatccctgaggctatagtg

SEQ ID NO: 207593 - DNA, 25 bp, Canis familiaris
ttccgctcacaggctgtgagtcctc

SEQ ID NO: 207594 - DNA, 25 bp, Canis familiaris
ttccggagagcagggcttgcactct

SEQ ID NO: 207595 - DNA, 25 bp, Canis familiaris
ttccagtggcgcagacgcgcctggg

SEQ ID NO: 207596 - DNA, 25 bp, Canis familiaris
ttccgggcctgcacggagctgggca

SEQ ID NO: 207597 - DNA, 25 bp, Canis familiaris
ttccggggctgcgcggagaggagca

SEQ ID NO: 207598 - DNA, 25 bp, Canis familiaris
ttccggcaggtccaaggcgcggaga

SEQ ID NO: 207599 - DNA, 25 bp, Canis familiaris
ttcccgctgtgtccacgcgggggaa

SEQ ID NO: 207600 - DNA, 25 bp, Canis familiaris
ttccctgtgggagcctgatgcggga

SEQ ID NO: 207601 - DNA, 25 bp, Canis familiaris
ttccctccggaggctctagggagaa

SEQ ID NO: 207602 - DNA, 25 bp, Canis familiaris
ttcccttagctgtgcatctaggaga

SEQ ID NO: 207603 - DNA, 25 bp, Canis familiaris
ttcctttgcctttgatgcctgaaga

SEQ ID NO: 207604 - DNA, 25 bp, Canis familiaris
ttcctgctcggccgagatggctaca

SEQ ID NO: 207605 - DNA, 25 bp, Canis familiaris
ttcctgtgctactgtatgtatacat

SEQ ID NO: 207606 - DNA, 25 bp, Canis familiaris
ttcctcctactgcacataatcacaa

SEQ ID NO: 207607 - DNA, 25 bp, Canis familiaris
ttcctccatgaccgttcagattaca

SEQ ID NO: 207608 - DNA, 25 bp, Canis familiaris
ttccccatcaagcttctgcatggag

SEQ ID NO: 207609 - DNA, 25 bp, Canis familiaris
ttcccctatagcgtttgcacgaggc

SEQ ID NO: 207610 - DNA, 25 bp, Canis familiaris
ttccaccttgatctaatcctgggct

SEQ ID NO: 207611 - DNA, 25 bp, Canis familiaris
ttgtcacgttatataatccctccca

SEQ ID NO: 207612 - DNA, 25 bp, Canis familiaris
ttgccggttataatacatggtctac

SEQ ID NO: 207613 - DNA, 25 bp, Canis familiaris
ttgcaaggtacatggtcaggcccca

SEQ ID NO: 207614 - DNA, 25 bp, Canis familiaris
ttgcaagtgccgtggacaatgcccg

SEQ ID NO: 207615 - DNA, 25 bp, Canis familiaris
ttgcctggcctctgaggcaagctca

SEQ ID NO: 207616 - DNA, 25 bp, Canis familiaris
ttccttgactctggaggaggcccca

SEQ ID NO: 207617 - DNA, 25 bp, Canis familiaris
ttccttctacttaggattccccaca

SEQ ID NO: 207618 - DNA, 25 bp, Canis familiaris
ttccttgtaatggtggttctcctcc

SEQ ID NO: 207619 - DNA, 25 bp, Canis familiaris
ttcctttaatgtactgtactgcctc

SEQ ID NO: 207620 - DNA, 25 bp, Canis familiaris
ttgccacttcaatgtttagagcctt

SEQ ID NO: 207621 - DNA, 25 bp, Canis familiaris
ttggccttcaaactttcaactccca

SEQ ID NO: 207622 - DNA, 25 bp, Canis familiaris
ttcccattaaaatttagccacacca

SEQ ID NO: 207623 - DNA, 25 bp, Canis familiaris
ttccactatattaattttgcccaaa

SEQ ID NO: 207624 - DNA, 25 bp, Canis familiaris
ttccctacatgctttttctgtctaa

SEQ ID NO: 207625 - DNA, 25 bp, Canis familiaris
ttcctttcatcatacttcttctgga

SEQ ID NO: 207626 - DNA, 25 bp, Canis familiaris
ttcctgtccttaactttttggtgat

SEQ ID NO: 207627 - DNA, 25 bp, Canis familiaris
ttccttccattcacctgtgtttatg

SEQ ID NO: 207628 - DNA, 25 bp, Canis familiaris
ttccttccctccctttgatataagg

SEQ ID NO: 207629 - DNA, 25 bp, Canis familiaris
ttccttctccctttttatatacagt

SEQ ID NO: 207630 - DNA, 25 bp, Canis familiaris
ttcccatctcccaaatttctgatca

SEQ ID NO: 207631 - DNA, 25 bp, Canis familiaris
ttcccacaccacacatttgtatgct

SEQ ID NO: 207632 - DNA, 25 bp, Canis familiaris
ttccaacctccagcttctgtaattc

SEQ ID NO: 207633 - DNA, 25 bp, Canis familiaris
ttccgtcctctaaagtcgtaattcg

SEQ ID NO: 207634 - DNA, 25 bp, Canis familiaris
ttccctgttctcatagtctgtattt

SEQ ID NO: 207635 - DNA, 25 bp, Canis familiaris
ttcccttttctacttcattgatttc

SEQ ID NO: 207636 - DNA, 25 bp, Canis familiaris
ttccctttgacatgctctgattttt

SEQ ID NO: 207637 - DNA, 25 bp, Canis familiaris
ttccccatgtcaattcctgtgattt

SEQ ID NO: 207638 - DNA, 25 bp, Canis familiaris
ttccctggcatcattacgtgtgtgt

SEQ ID NO: 207639 - DNA, 25 bp, Canis familiaris
ttcccatggatttaaggtgctttcg

SEQ ID NO: 207640 - DNA, 25 bp, Canis familiaris
ttcccccattaattgctgttgcatt

SEQ ID NO: 207641 - DNA, 25 bp, Canis familiaris
ttcccactatatttatgtttgcccc

SEQ ID NO: 207642 - DNA, 25 bp, Canis familiaris
ttccatctagtttaattttcaccct

SEQ ID NO: 207643 - DNA, 25 bp, Canis familiaris
ttccatgaagctttgacataatcta

SEQ ID NO: 207644 - DNA, 25 bp, Canis familiaris
ttccaagcatgtttcatcatctccc

SEQ ID NO: 207645 - DNA, 25 bp, Canis familiaris
ttgccacaggtcttcatgtgcaccg

SEQ ID NO: 207646 - DNA, 25 bp, Canis familiaris
ttgccaggtcacttttaatgcgttg

SEQ ID NO: 207647 - DNA, 25 bp, Canis familiaris
ttccatcgtcaccttttgtgcattt

SEQ ID NO: 207648 - DNA, 25 bp, Canis familiaris
ttccttgtcagttttcctgttttca

SEQ ID NO: 207649 - DNA, 25 bp, Canis familiaris
ttccttctcacttttgcatgttttt

SEQ ID NO: 207650 - DNA, 25 bp, Canis familiaris
ttcctgctcccttaatgttctaagc

SEQ ID NO: 207651 - DNA, 25 bp, Canis familiaris
ttccttccaggatagttgctagcag

SEQ ID NO: 207652 - DNA, 25 bp, Canis familiaris
ttccttcctgggcatggagtcctgt

SEQ ID NO: 207653 - DNA, 25 bp, Canis familiaris
ttccttcctgggtatggagtcctgc

SEQ ID NO: 207654 - DNA, 25 bp, Canis familiaris
ttccttttgcaggaaaggtcacagc

SEQ ID NO: 207655 - DNA, 25 bp, Canis familiaris
ttcctttctcccaaagtggcaaaat

SEQ ID NO: 207656 - DNA, 25 bp, Canis familiaris
ttccagcttcttctcagagtccaaa

SEQ ID NO: 207657 - DNA, 25 bp, Canis familiaris
ttccagcttcttctcagagtccaaa

SEQ ID NO: 207658 - DNA, 25 bp, Canis familiaris
ttccagcttcttctcagagtccaaa

SEQ ID NO: 207659 - DNA, 25 bp, Canis familiaris
ttccctacctgccattaatccaggg

SEQ ID NO: 207660 - DNA, 25 bp, Canis familiaris
ttcctgggctcctcataaccagagg

SEQ ID NO: 207661 - DNA, 25 bp, Canis familiaris
ttccaggagtcctgaaatcccactt

SEQ ID NO: 207662 - DNA, 25 bp, Canis familiaris
ttccaggagccctgaaatcccactt

SEQ ID NO: 207663 - DNA, 25 bp, Canis familiaris
ttccgccacaacagcaagatcacca

SEQ ID NO: 207664 - DNA, 25 bp, Canis familiaris
ttcctgtcaagacacacagctgccc

SEQ ID NO: 207665 - DNA, 25 bp, Canis familiaris
ttgccgtaatgcataccctggccag

SEQ ID NO: 207666 - DNA, 25 bp, Canis familiaris
ttgccgctaagccttaccaggagac

SEQ ID NO: 207667 - DNA, 25 bp, Canis familiaris
ttccgtgcaagcttccagtcaaaac

SEQ ID NO: 207668 - DNA, 25 bp, Canis familiaris
ttccttccttgttcagcatcaaaga

SEQ ID NO: 207669 - DNA, 25 bp, Canis familiaris
ttcctgcattctcattcctgaattg

SEQ ID NO: 207670 - DNA, 25 bp, Canis familiaris
ttgtcgttctctatcactacgtggc

SEQ ID NO: 207671 - DNA, 25 bp, Canis familiaris
ttgagcagtactctctgacttcagg

SEQ ID NO: 207672 - DNA, 25 bp, Canis familiaris
ttgcaaatcagctaagtgacttcag

SEQ ID NO: 207673 - DNA, 25 bp, Canis familiaris
ttgatcagacaatagtcgactcagt

SEQ ID NO: 207674 - DNA, 25 bp, Canis familiaris
ttgagatggcaatcagtctgggaca

SEQ ID NO: 207675 - DNA, 25 bp, Canis familiaris
ttgcttggcacatgagttgggctca

SEQ ID NO: 207676 - DNA, 25 bp, Canis familiaris
ttgctcggcaagtagatggagataa

SEQ ID NO: 207677 - DNA, 25 bp, Canis familiaris
ttgatcatgatgcagagttggagaa

SEQ ID NO: 207678 - DNA, 25 bp, Canis familiaris
ttgattatgtgatggagtgaaagat

SEQ ID NO: 207679 - DNA, 25 bp, Canis familiaris
ttgctattgtaatttgtgtagtata

SEQ ID NO: 207680 - DNA, 25 bp, Canis familiaris
ttgccatggtaatcctgctcagtac

SEQ ID NO: 207681 - DNA, 25 bp, Canis familiaris
ttcctggataatagctgtgtcattg

SEQ ID NO: 207682 - DNA, 25 bp, Canis familiaris
ttccctgaaatcctgtccttgtcag

SEQ ID NO: 207683 - DNA, 25 bp, Canis familiaris
ttcccatggaatgtgatgctctttc

SEQ ID NO: 207684 - DNA, 25 bp, Canis familiaris
ttccctcgaatgctgatgagcttgt

SEQ ID NO: 207685 - DNA, 25 bp, Canis familiaris
ttccctcgaatgcttgatgaagctt

SEQ ID NO: 207686 - DNA, 25 bp, Canis familiaris
ttccctctatctcttctgagagtgt

SEQ ID NO: 207687 - DNA, 25 bp, Canis familiaris
ttccctgccatttgagctctgaggg

SEQ ID NO: 207688 - DNA, 25 bp, Canis familiaris
ttccctgtctgaagcagcctgaacg

SEQ ID NO: 207689 - DNA, 25 bp, Canis familiaris
ttcccgggatagcagctgcaaggac

SEQ ID NO: 207690 - DNA, 25 bp, Canis familiaris
ttccctggggcgtgctgcaggaact

SEQ ID NO: 207691 - DNA, 25 bp, Canis familiaris
ttccctttgctggatggctgcagaa

SEQ ID NO: 207692 - DNA, 25 bp, Canis familiaris
ttcccttctctggatgacttgcatg

SEQ ID NO: 207693 - DNA, 25 bp, Canis familiaris
ttcccttccatcttgagcaagcagg

SEQ ID NO: 207694 - DNA, 25 bp, Canis familiaris
ttcccctccatcttcagaaatagca

SEQ ID NO: 207695 - DNA, 25 bp, Canis familiaris
ttcccctgtatttcccagataaact

SEQ ID NO: 207696 - DNA, 25 bp, Canis familiaris
ttccacctgataagacccgagacaa

SEQ ID NO: 207697 - DNA, 25 bp, Canis familiaris
ttcctcaccttcaacagcctggaaa

SEQ ID NO: 207698 - DNA, 25 bp, Canis familiaris
ttccagaccctcatgcagttggttg

SEQ ID NO: 207699 - DNA, 25 bp, Canis familiaris
ttccaacccagttgaattggttcca

SEQ ID NO: 207700 - DNA, 25 bp, Canis familiaris
ttccgctcgccacaaatatgggtac

SEQ ID NO: 207701 - DNA, 25 bp, Canis familiaris
ttccctccccttatcatgaatgata

SEQ ID NO: 207702 - DNA, 25 bp, Canis familiaris
ttccctccctaatttatcaagagaa

SEQ ID NO: 207703 - DNA, 25 bp, Canis familiaris
ttgccgccaccaaagttgataagat

SEQ ID NO: 207704 - DNA, 25 bp, Canis familiaris
ttcccccagcacaggtgacgatgat

SEQ ID NO: 207705 - DNA, 25 bp, Canis familiaris
ttccggagagacaggcgacgtgtgc

SEQ ID NO: 207706 - DNA, 25 bp, Canis familiaris
ttccggagagacagggtcttgcact

SEQ ID NO: 207707 - DNA, 25 bp, Canis familiaris
ttcccgagaggtcggcgatcttccg

SEQ ID NO: 207708 - DNA, 25 bp, Canis familiaris
ttcccgcagaacctgaagatgttcg

SEQ ID NO: 207709 - DNA, 25 bp, Canis familiaris
ttcctccagcagtctagacaggtgc

SEQ ID NO: 207710 - DNA, 25 bp, Canis familiaris
ttcctccagccaatggtcaggctgc

SEQ ID NO: 207711 - DNA, 25 bp, Canis familiaris
ttccccaccctgatagtgatgcatc

SEQ ID NO: 207712 - DNA, 25 bp, Canis familiaris
ttccatgtgcacccgttactagcac

SEQ ID NO: 207713 - DNA, 25 bp, Canis familiaris
ttcctgtccccaggtcagcagaagc

SEQ ID NO: 207714 - DNA, 25 bp, Canis familiaris
ttcctccctccaggtcgggaggcaa

SEQ ID NO: 207715 - DNA, 25 bp, Canis familiaris
ttccatccgtaaggccgtgttggca

SEQ ID NO: 207716 - DNA, 25 bp, Canis familiaris
ttgagcccctaagggaggctatctg

SEQ ID NO: 207717 - DNA, 25 bp, Canis familiaris
ttgacccccagagtgtagatgctat

SEQ ID NO: 207718 - DNA, 25 bp, Canis familiaris
ttgaacccctgcttgggacttttga

SEQ ID NO: 207719 - DNA, 25 bp, Canis familiaris
ttgagactcggtgtggactttttga

SEQ ID NO: 207720 - DNA, 25 bp, Canis familiaris
ttccctggtgctgtggcactttgta

SEQ ID NO: 207721 - DNA, 25 bp, Canis familiaris
ttccctgggagctaggaatttctag

SEQ ID NO: 207722 - DNA, 25 bp, Canis familiaris
ttcccgggatgctgtgcagtttcag

SEQ ID NO: 207723 - DNA, 25 bp, Canis familiaris
ttccctgggctgtaggcagagtcca

SEQ ID NO: 207724 - DNA, 25 bp, Canis familiaris
ttccacgtgggatggagcacacccc

SEQ ID NO: 207725 - DNA, 25 bp, Canis familiaris
ttcccgggatcaagagaacatcatc

SEQ ID NO: 207726 - DNA, 25 bp, Canis familiaris
ttccctacattctagaaacatccct

SEQ ID NO: 207727 - DNA, 25 bp, Canis familiaris
ttccacttgtcctaataactcccgg

SEQ ID NO: 207728 - DNA, 25 bp, Canis familiaris
ttgcaactgttgccatgaaacctcc

SEQ ID NO: 207729 - DNA, 25 bp, Canis familiaris
ttgcagctgctctggaaggactctc

SEQ ID NO: 207730 - DNA, 25 bp, Canis familiaris
ttgcagcgtagccggagaacattcc

SEQ ID NO: 207731 - DNA, 25 bp, Canis familiaris
ttgactttgcgcggagacctggaac

SEQ ID NO: 207732 - DNA, 25 bp, Canis familiaris
ttgaccttggcccaattgtgagccc

SEQ ID NO: 207733 - DNA, 25 bp, Canis familiaris
ttgcccaatcccaagagggacccca

SEQ ID NO: 207734 - DNA, 25 bp, Canis familiaris
ttcccatagccgcagggtgacttcc

SEQ ID NO: 207735 - DNA, 25 bp, Canis familiaris
ttcccatagccgcagggtgacttcc

SEQ ID NO: 207736 - DNA, 25 bp, Canis familiaris
ttccaagagcctgcaagttcctgtc

SEQ ID NO: 207737 - DNA, 25 bp, Canis familiaris
ttcctgaatcctggcaacttccatc

SEQ ID NO: 207738 - DNA, 25 bp, Canis familiaris
ttcctgcaatcagacgtcttcttcc

SEQ ID NO: 207739 - DNA, 25 bp, Canis familiaris
ttgcctcatgaacacggaccgtgac

SEQ ID NO: 207740 - DNA, 25 bp, Canis familiaris
ttcccgagacaacggattctgtgga

SEQ ID NO: 207741 - DNA, 25 bp, Canis familiaris
ttggggaaccaatgaatctgtggat

SEQ ID NO: 207742 - DNA, 25 bp, Canis familiaris
ttgaaggcaaccaaatcacccaggt

SEQ ID NO: 207743 - DNA, 25 bp, Canis familiaris
ttgtaggaaccatatacggatgtat

SEQ ID NO: 207744 - DNA, 25 bp, Canis familiaris
ttgtttgcacccaatcaacggactt

SEQ ID NO: 207745 - DNA, 25 bp, Canis familiaris
ttcctggacctcacagagcaggagt

SEQ ID NO: 207746 - DNA, 25 bp, Canis familiaris
ttcctggaacctgatctggagccat

SEQ ID NO: 207747 - DNA, 25 bp, Canis familiaris
ttccaggaatcttcttcggaccatc

SEQ ID NO: 207748 - DNA, 25 bp, Canis familiaris
ttccagtatattggctcctgtcacc

SEQ ID NO: 207749 - DNA, 25 bp, Canis familiaris
ttgccacttaatagccacagctgcc

SEQ ID NO: 207750 - DNA, 25 bp, Canis familiaris
ttccaacaaagtccacactgctcta

SEQ ID NO: 207751 - DNA, 25 bp, Canis familiaris
ttccattaaaggttcaggctgaagg

SEQ ID NO: 207752 - DNA, 25 bp, Canis familiaris
ttccttcatccagggtcgagtgacc

SEQ ID NO: 207753 - DNA, 25 bp, Canis familiaris
ttccttccagaggctctgcgaggcc

SEQ ID NO: 207754 - DNA, 25 bp, Canis familiaris
ttccattcccagttctgatcagacc

SEQ ID NO: 207755 - DNA, 25 bp, Canis familiaris
ttccttgtccatgtctaagcacagg

SEQ ID NO: 207756 - DNA, 25 bp, Canis familiaris
ttcctcttcgatggactgcaagcca

SEQ ID NO: 207757 - DNA, 25 bp, Canis familiaris
ttccacttggacgagcataagctca

SEQ ID NO: 207758 - DNA, 25 bp, Canis familiaris
ttccctttaccagtagcatcatcgg

SEQ ID NO: 207759 - DNA, 25 bp, Canis familiaris
ttgctcattttaccagaagaccagg

SEQ ID NO: 207760 - DNA, 25 bp, Canis familiaris
ttgctcaattacagaaaaccaggtc

SEQ ID NO: 207761 - DNA, 25 bp, Canis familiaris
ttccaacttaatgcccacacaggtc

SEQ ID NO: 207762 - DNA, 25 bp, Canis familiaris
ttccgacctcaagcccagcttgagg

SEQ ID NO: 207763 - DNA, 25 bp, Canis familiaris
ttccatggattcttccaccagttgg

SEQ ID NO: 207764 - DNA, 25 bp, Canis familiaris
ttccatggatctctcatctctagag

SEQ ID NO: 207765 - DNA, 25 bp, Canis familiaris
ttccaggctatgctccctaaatgga

SEQ ID NO: 207766 - DNA, 25 bp, Canis familiaris
ttccagaccgcggcctaataatgag

SEQ ID NO: 207767 - DNA, 25 bp, Canis familiaris
ttccagagcctggtgcctggttttg

SEQ ID NO: 207768 - DNA, 25 bp, Canis familiaris
ttccagagcctggtgcctggttttg

SEQ ID NO: 207769 - DNA, 25 bp, Canis familiaris
ttccagagcctggtgcctggttttg

SEQ ID NO: 207770 - DNA, 25 bp, Canis familiaris
ttccagagcctggtgcctggttttg

SEQ ID NO: 207771 - DNA, 25 bp, Canis familiaris
ttccagagcctggtgcctggttttg

SEQ ID NO: 207772 - DNA, 25 bp, Canis familiaris
ttccagagcctggtgcctggttttg

SEQ ID NO: 207773 - DNA, 25 bp, Canis familiaris
ttccaatccggagctcaggcttggc

SEQ ID NO: 207774 - DNA, 25 bp, Canis familiaris
ttccaacgtggaacacagtcacaga

SEQ ID NO: 207775 - DNA, 25 bp, Canis familiaris
ttgccagtttggacaaagccaatga

SEQ ID NO: 207776 - DNA, 25 bp, Canis familiaris
ttccttgcttggtcacctgacaatt

SEQ ID NO: 207777 - DNA, 25 bp, Canis familiaris
ttccttcctgtgtcaccttaagttt

SEQ ID NO: 207778 - DNA, 25 bp, Canis familiaris
ttcctcccgatgtcatctcggtaga

SEQ ID NO: 207779 - DNA, 25 bp, Canis familiaris
ttcctccatcgtcatatctggctga

SEQ ID NO: 207780 - DNA, 25 bp, Canis familiaris
ttcctctaggtggcaagcggcgact

SEQ ID NO: 207781 - DNA, 25 bp, Canis familiaris
ttcctgctgggcggcataggggagc

SEQ ID NO: 207782 - DNA, 25 bp, Canis familiaris
ttcctctggagcgctgcagctgagg

SEQ ID NO: 207783 - DNA, 25 bp, Canis familiaris
ttcctcctgactggcatatgcagcg

SEQ ID NO: 207784 - DNA, 25 bp, Canis familiaris
ttcctgctgagagtccagatgtgcc

SEQ ID NO: 207785 - DNA, 25 bp, Canis familiaris
ttgcggcgaagtccagtgtgggaac

SEQ ID NO: 207786 - DNA, 25 bp, Canis familiaris
ttgggagggctttgtgggcgagcct

SEQ ID NO: 207787 - DNA, 25 bp, Canis familiaris
ttggccagtggctgtttggccacgt

SEQ ID NO: 207788 - DNA, 25 bp, Canis familiaris
ttcccgctggtattgtcttgccagg

SEQ ID NO: 207789 - DNA, 25 bp, Canis familiaris
ttccacctggtctttcttgacaggg

SEQ ID NO: 207790 - DNA, 25 bp, Canis familiaris
ttccacacgtgggctaatttgaggg

SEQ ID NO: 207791 - DNA, 25 bp, Canis familiaris
ttgcccatcctgctgataacgtggg

SEQ ID NO: 207792 - DNA, 25 bp, Canis familiaris
ttccctcctcaggaacctgcaggag

SEQ ID NO: 207793 - DNA, 25 bp, Canis familiaris
ttccctgttgctcacgtctgcaggg

SEQ ID NO: 207794 - DNA, 25 bp, Canis familiaris
ttccacgtgtccaagccttgtgggg

SEQ ID NO: 207795 - DNA, 25 bp, Canis familiaris
ttcccctggccaaccattgagatga

SEQ ID NO: 207796 - DNA, 25 bp, Canis familiaris
ttcctcctggtcatcgtggagctga

SEQ ID NO: 207797 - DNA, 25 bp, Canis familiaris
ttcctgttggtcgctctgtggatga

SEQ ID NO: 207798 - DNA, 25 bp, Canis familiaris
ttcctgaggggctcctgcaggcata

SEQ ID NO: 207799 - DNA, 25 bp, Canis familiaris
ttccgtggtgacgacctcaggagag

SEQ ID NO: 207800 - DNA, 25 bp, Canis familiaris
ttccggaggagtacctagtgagctt

SEQ ID NO: 207801 - DNA, 25 bp, Canis familiaris
ttgccagaggtggttcctagtgcgc

SEQ ID NO: 207802 - DNA, 25 bp, Canis familiaris
ttccaatgttgaggtgcctttgcct

SEQ ID NO: 207803 - DNA, 25 bp, Canis familiaris
ttcctgcgtgtatctgcattttgcc

SEQ ID NO: 207804 - DNA, 25 bp, Canis familiaris
ttcctgctggtgacctgcacagcat

SEQ ID NO: 207805 - DNA, 25 bp, Canis familiaris
ttccgcttatgagtcacagagcaag

SEQ ID NO: 207806 - DNA, 25 bp, Canis familiaris
ttccctccatgaacacatggagaaa

SEQ ID NO: 207807 - DNA, 25 bp, Canis familiaris
ttcccccagcgattcatagcagtaa

SEQ ID NO: 207808 - DNA, 25 bp, Canis familiaris
ttccctcctcaatcacatggtgaat

SEQ ID NO: 207809 - DNA, 25 bp, Canis familiaris
ttcctctcgcaacactatgtctgga

SEQ ID NO: 207810 - DNA, 25 bp, Canis familiaris
ttcctgttcatacatttgtgctgcc

SEQ ID NO: 207811 - DNA, 25 bp, Canis familiaris
ttcctgttctgtgctttgcagcagg

SEQ ID NO: 207812 - DNA, 25 bp, Canis familiaris
ttgcctttcatgagctgtggacagt

SEQ ID NO: 207813 - DNA, 25 bp, Canis familiaris
ttgcgtcctctgagcgagtgagcgt

SEQ ID NO: 207814 - DNA, 25 bp, Canis familiaris
ttgcctcacttgctcaaggacgtcg

SEQ ID NO: 207815 - DNA, 25 bp, Canis familiaris
ttcctccagtgctgcaaggaagtgg

SEQ ID NO: 207816 - DNA, 25 bp, Canis familiaris
ttcctcctgcccgaagagagactgg

SEQ ID NO: 207817 - DNA, 25 bp, Canis familiaris
ttccctgtgctctgggagaatagag

SEQ ID NO: 207818 - DNA, 25 bp, Canis familiaris
ttcccgggatggcgagagcagagag

SEQ ID NO: 207819 - DNA, 25 bp, Canis familiaris
ttcccgggatgggccaggagcaggc

SEQ ID NO: 207820 - DNA, 25 bp, Canis familiaris
ttcccgggatgggggacacaggcac

SEQ ID NO: 207821 - DNA, 25 bp, Canis familiaris
ttcccgggatcgggcagatcgacgc

SEQ ID NO: 207822 - DNA, 25 bp, Canis familiaris
ttcccgggatcggtgatgatcccag

SEQ ID NO: 207823 - DNA, 25 bp, Canis familiaris
ttgcccgagctgtgcggaatcacca

SEQ ID NO: 207824 - DNA, 25 bp, Canis familiaris
ttcccgagcgtgtgtgcaagcaagc

SEQ ID NO: 207825 - DNA, 25 bp, Canis familiaris
ttgccagctagcgagaactgaacaa

SEQ ID NO: 207826 - DNA, 25 bp, Canis familiaris
ttgctcactgctgctcagatgtcaa

SEQ ID NO: 207827 - DNA, 25 bp, Canis familiaris
ttgctccagcacctgattgtcatta

SEQ ID NO: 207828 - DNA, 25 bp, Canis familiaris
ttccacagccagatctcatcatctg

SEQ ID NO: 207829 - DNA, 25 bp, Canis familiaris
ttccactgccaggcctgtagctggc

SEQ ID NO: 207830 - DNA, 25 bp, Canis familiaris
ttccctgccaggccgagcagcaggg

SEQ ID NO: 207831 - DNA, 25 bp, Canis familiaris
ttccctgccagctacgtgcaggtgt

SEQ ID NO: 207832 - DNA, 25 bp, Canis familiaris
ttcctcgccagctggtagatgcttg

SEQ ID NO: 207833 - DNA, 25 bp, Canis familiaris
ttccccacagctgggcgtgagatga

SEQ ID NO: 207834 - DNA, 25 bp, Canis familiaris
ttcccctgcagctgtggtgtagagg

SEQ ID NO: 207835 - DNA, 25 bp, Canis familiaris
ttccccatgcctggttttgatgagc

SEQ ID NO: 207836 - DNA, 25 bp, Canis familiaris
ttccccacatctgttcttgagagtg

SEQ ID NO: 207837 - DNA, 25 bp, Canis familiaris
ttcctaccattggttttaatgtgga

SEQ ID NO: 207838 - DNA, 25 bp, Canis familiaris
ttccttgccttgaccattgtaattg

SEQ ID NO: 207839 - DNA, 25 bp, Canis familiaris
ttcctttctgcttgctctagtaaat

SEQ ID NO: 207840 - DNA, 25 bp, Canis familiaris
ttccttttttcttttatatcatgtg

SEQ ID NO: 207841 - DNA, 25 bp, Canis familiaris
ttccttcttgcttctgaattttctt

SEQ ID NO: 207842 - DNA, 25 bp, Canis familiaris
ttgacgatcaacaaagacttttttt

SEQ ID NO: 207843 - DNA, 25 bp, Canis familiaris
ttgacaaatcgatcgcactttctct

SEQ ID NO: 207844 - DNA, 25 bp, Canis familiaris
ttgatcaacttacctacctatcttc

SEQ ID NO: 207845 - DNA, 25 bp, Canis familiaris
ttgaaacctacccacctgtattgtg

SEQ ID NO: 207846 - DNA, 25 bp, Canis familiaris
ttgaataccattaaaactgcttttt

SEQ ID NO: 207847 - DNA, 25 bp, Canis familiaris
ttgacaagcctatttcgagtttttt

SEQ ID NO: 207848 - DNA, 25 bp, Canis familiaris
ttgaaaaaatttgttgttctcttct

SEQ ID NO: 207849 - DNA, 25 bp, Canis familiaris
ttgactaaaattttatttctctcaa

SEQ ID NO: 207850 - DNA, 25 bp, Canis familiaris
ttggtagaaccctttcttcattgcc

SEQ ID NO: 207851 - DNA, 25 bp, Canis familiaris
ttccataggaccacgtttttgccac

SEQ ID NO: 207852 - DNA, 25 bp, Canis familiaris
ttcctaggacccagtctcttattca

SEQ ID NO: 207853 - DNA, 25 bp, Canis familiaris
ttgttgggatttacgccttctttat

SEQ ID NO: 207854 - DNA, 25 bp, Canis familiaris
ttggtggtggacatcggtcctttct

SEQ ID NO: 207855 - DNA, 25 bp, Canis familiaris
ttggaggtgtccagggcatcttgtt

SEQ ID NO: 207856 - DNA, 25 bp, Canis familiaris
ttgtcatggactctggggatggcgt

SEQ ID NO: 207857 - DNA, 25 bp, Canis familiaris
ttgccgcgactgtctggggagacag

SEQ ID NO: 207858 - DNA, 25 bp, Canis familiaris
ttgcgagcgggttgggaggtaggaa

SEQ ID NO: 207859 - DNA, 25 bp, Canis familiaris
ttggacgggcgatgctgagggtggg

SEQ ID NO: 207860 - DNA, 25 bp, Canis familiaris
ttgcgagcgggctcgcaggctgggg

SEQ ID NO: 207861 - DNA, 25 bp, Canis familiaris
ttccagggccatagccagtgtgcgc

SEQ ID NO: 207862 - DNA, 25 bp, Canis familiaris
ttcctggagctggagccagtcctca

SEQ ID NO: 207863 - DNA, 25 bp, Canis familiaris
ttgtgtggactttcctgatgcacgc

SEQ ID NO: 207864 - DNA, 25 bp, Canis familiaris
ttgttgcagtgaaatccgatgacca

SEQ ID NO: 207865 - DNA, 25 bp, Canis familiaris
ttgcctcagtcatacctgattcacg

SEQ ID NO: 207866 - DNA, 25 bp, Canis familiaris
ttgctctgcattcaaagctggcccg

SEQ ID NO: 207867 - DNA, 25 bp, Canis familiaris
ttcctgcaaaacctgatggctccgt

SEQ ID NO: 207868 - DNA, 25 bp, Canis familiaris
ttcctgaactacaaatctgctcctg

SEQ ID NO: 207869 - DNA, 25 bp, Canis familiaris
ttccgaacataatacctcactgtga

SEQ ID NO: 207870 - DNA, 25 bp, Canis familiaris
ttgggaagcaaattgactttaatga

SEQ ID NO: 207871 - DNA, 25 bp, Canis familiaris
ttggaaacgaactcttccctggaat

SEQ ID NO: 207872 - DNA, 25 bp, Canis familiaris
ttggaaagcccctagataacctgag

SEQ ID NO: 207873 - DNA, 25 bp, Canis familiaris
ttggcactaccctgaagaactgtag

SEQ ID NO: 207874 - DNA, 25 bp, Canis familiaris
ttgctacagaagccatcgaaaactt

SEQ ID NO: 207875 - DNA, 25 bp, Canis familiaris
ttgccagcacggctgctaacagact

SEQ ID NO: 207876 - DNA, 25 bp, Canis familiaris
ttgccagacgcctatgtgagcacaa

SEQ ID NO: 207877 - DNA, 25 bp, Canis familiaris
ttggcaacccaggctgcatatcaga

SEQ ID NO: 207878 - DNA, 25 bp, Canis familiaris
ttgcgcaacatctgggcaggcaggg

SEQ ID NO: 207879 - DNA, 25 bp, Canis familiaris
ttggaccatgggctgagctcaggca

SEQ ID NO: 207880 - DNA, 25 bp, Canis familiaris
ttgccacctgggttagccaaatcct

SEQ ID NO: 207881 - DNA, 25 bp, Canis familiaris
ttgccacttgggagaccaacactct

SEQ ID NO: 207882 - DNA, 25 bp, Canis familiaris
ttccagcttcggcctgcacagaacc

SEQ ID NO: 207883 - DNA, 25 bp, Canis familiaris
ttgcctttagctccgagcgtgatcc

SEQ ID NO: 207884 - DNA, 25 bp, Canis familiaris
ttgtcgggagctcctagctgtacag

SEQ ID NO: 207885 - DNA, 25 bp, Canis familiaris
ttgctcggatggccctagcattact

SEQ ID NO: 207886 - DNA, 25 bp, Canis familiaris
ttcctggagcagcctctccattgat

SEQ ID NO: 207887 - DNA, 25 bp, Canis familiaris
ttcctggagaccatggcttgatgga

SEQ ID NO: 207888 - DNA, 25 bp, Canis familiaris
ttcctggagatcatggcgctcgtgg

SEQ ID NO: 207889 - DNA, 25 bp, Canis familiaris
ttcctgaagccacttgagcacgtgg

SEQ ID NO: 207890 - DNA, 25 bp, Canis familiaris
ttcctaagatctgctgagcccatcg

SEQ ID NO: 207891 - DNA, 25 bp, Canis familiaris
ttccagaagattggcgctgcaccca

SEQ ID NO: 207892 - DNA, 25 bp, Canis familiaris
ttccaaggggcaggcgctgccccca

SEQ ID NO: 207893 - DNA, 25 bp, Canis familiaris
ttgcacaaagtgaacaggtccccta

SEQ ID NO: 207894 - DNA, 25 bp, Canis familiaris
ttgaaaagccaccatttatccctca

SEQ ID NO: 207895 - DNA, 25 bp, Canis familiaris
ttgaaaaccactggcttacgcccac

SEQ ID NO: 207896 - DNA, 25 bp, Canis familiaris
ttgaaacccagatctttctccagac

SEQ ID NO: 207897 - DNA, 25 bp, Canis familiaris
ttgaacaccagaagactttccggac

SEQ ID NO: 207898 - DNA, 25 bp, Canis familiaris
ttcctcccagagggcatttcctgga

SEQ ID NO: 207899 - DNA, 25 bp, Canis familiaris
ttccgcccagaagtattgtcccggc

SEQ ID NO: 207900 - DNA, 25 bp, Canis familiaris
ttccgtctcagattcttgtacctgg

SEQ ID NO: 207901 - DNA, 25 bp, Canis familiaris
ttccttttgaaattgagcacctgtg

SEQ ID NO: 207902 - DNA, 25 bp, Canis familiaris
ttccatgtttgtacttggcctcttc

SEQ ID NO: 207903 - DNA, 25 bp, Canis familiaris
ttcctttttctggcattgccttttt

SEQ ID NO: 207904 - DNA, 25 bp, Canis familiaris
ttcctttttttcctgctcaataaat

SEQ ID NO: 207905 - DNA, 25 bp, Canis familiaris
ttccttagctttgcccagaacacag

SEQ ID NO: 207906 - DNA, 25 bp, Canis familiaris
ttccttagcatgtttataaatacca

SEQ ID NO: 207907 - DNA, 25 bp, Canis familiaris
ttccatcctcagttccataaacact

SEQ ID NO: 207908 - DNA, 25 bp, Canis familiaris
ttccatcccagttaatgtcaccagc

SEQ ID NO: 207909 - DNA, 25 bp, Canis familiaris
ttccagcaccagcggatgaccaatg

SEQ ID NO: 207910 - DNA, 25 bp, Canis familiaris
ttccccaaggcccagaaacatgtgt

SEQ ID NO: 207911 - DNA, 25 bp, Canis familiaris
ttcctcggggtccgtggaattgttg

SEQ ID NO: 207912 - DNA, 25 bp, Canis familiaris
ttgctgctcggggtcaagggacacg

SEQ ID NO: 207913 - DNA, 25 bp, Canis familiaris
ttgtctctggaactcttggtaaggc

SEQ ID NO: 207914 - DNA, 25 bp, Canis familiaris
ttggcgtggtgtgcttggtaagcac

SEQ ID NO: 207915 - DNA, 25 bp, Canis familiaris
ttgccgcagtttgtctgagctgaag

SEQ ID NO: 207916 - DNA, 25 bp, Canis familiaris
ttgcccgcgtatgtctgcagatagg

SEQ ID NO: 207917 - DNA, 25 bp, Canis familiaris
ttgcttcagggatgtccagatcggg

SEQ ID NO: 207918 - DNA, 25 bp, Canis familiaris
ttgcttgcatgacagctccagcagg

SEQ ID NO: 207919 - DNA, 25 bp, Canis familiaris
ttgcttgatggttacaatgcaagac

SEQ ID NO: 207920 - DNA, 25 bp, Canis familiaris
ttgcggtgttaagcacaatgtgcac

SEQ ID NO: 207921 - DNA, 25 bp, Canis familiaris
ttgcaggatggtaggacacaaggac

SEQ ID NO: 207922 - DNA, 25 bp, Canis familiaris
ttgaggagtttgctgccaagtgcca

SEQ ID NO: 207923 - DNA, 25 bp, Canis familiaris
ttggtaccatatctcaaagctgccc

SEQ ID NO: 207924 - DNA, 25 bp, Canis familiaris
ttgactcccaatctaatacccaggc

SEQ ID NO: 207925 - DNA, 25 bp, Canis familiaris
ttgactccacaactcttgaacacca

SEQ ID NO: 207926 - DNA, 25 bp, Canis familiaris
ttcctccacatccctgagaaaacag

SEQ ID NO: 207927 - DNA, 25 bp, Canis familiaris
ttgcgctccaacaagatgaaagaaa

SEQ ID NO: 207928 - DNA, 25 bp, Canis familiaris
ttgactccagacagcatccagaaga

SEQ ID NO: 207929 - DNA, 25 bp, Canis familiaris
ttccaccaagcaggcatctcagaaa

SEQ ID NO: 207930 - DNA, 25 bp, Canis familiaris
ttccatccatgccactggcctaaaa

SEQ ID NO: 207931 - DNA, 25 bp, Canis familiaris
ttccttctggcaaggcctcttattt

SEQ ID NO: 207932 - DNA, 25 bp, Canis familiaris
ttccttgctggaagaaccctttaat

SEQ ID NO: 207933 - DNA, 25 bp, Canis familiaris
ttcctgaagtgaccaactccgtttt

SEQ ID NO: 207934 - DNA, 25 bp, Canis familiaris
ttcctgaagcagcagccactgttgc

SEQ ID NO: 207935 - DNA, 25 bp, Canis familiaris
ttcctgaggcagatgcaccacgtgc

SEQ ID NO: 207936 - DNA, 25 bp, Canis familiaris
ttccttggaattgcagccgctgtat

SEQ ID NO: 207937 - DNA, 25 bp, Canis familiaris
ttggtcgggatgctagccagtgcta

SEQ ID NO: 207938 - DNA, 25 bp, Canis familiaris
ttgtgggcccagctgaaactgcaga

SEQ ID NO: 207939 - DNA, 25 bp, Canis familiaris
ttgtgggatccagcccaacgacagg

SEQ ID NO: 207940 - DNA, 25 bp, Canis familiaris
ttgcgggcggaggtccaaaggcagg

SEQ ID NO: 207941 - DNA, 25 bp, Canis familiaris
ttgccaggctggtgcccaaagtaat

SEQ ID NO: 207942 - DNA, 25 bp, Canis familiaris
ttggcaggctggtgcaaaagttatt

SEQ ID NO: 207943 - DNA, 25 bp, Canis familiaris
ttggctcctcctagaaaggtctttg

SEQ ID NO: 207944 - DNA, 25 bp, Canis familiaris
ttgggtccccagagaggatgcttgg

SEQ ID NO: 207945 - DNA, 25 bp, Canis familiaris
ttgggtgtccttagatgggtagctg

SEQ ID NO: 207946 - DNA, 25 bp, Canis familiaris
ttgcggcagtccttgtgggggaagg

SEQ ID NO: 207947 - DNA, 25 bp, Canis familiaris
ttgtagcctcgccgtgggaggtacc

SEQ ID NO: 207948 - DNA, 25 bp, Canis familiaris
ttgtgtaacccgagttggaaccatt

SEQ ID NO: 207949 - DNA, 25 bp, Canis familiaris
ttgtcccccacgagttataatacat

SEQ ID NO: 207950 - DNA, 25 bp, Canis familiaris
ttgccacccgggactttataaactg

SEQ ID NO: 207951 - DNA, 25 bp, Canis familiaris
ttgcccaccagtcctttaatgaaga

SEQ ID NO: 207952 - DNA, 25 bp, Canis familiaris
ttgcccactcagcgtttacaaataa

SEQ ID NO: 207953 - DNA, 25 bp, Canis familiaris
ttgccctcctgttacttaattataa

SEQ ID NO: 207954 - DNA, 25 bp, Canis familiaris
ttccgtccgtaattttcatttgaag

SEQ ID NO: 207955 - DNA, 25 bp, Canis familiaris
ttccttccgtcacatcttatgttaa

SEQ ID NO: 207956 - DNA, 25 bp, Canis familiaris
ttccgagcctgttttctttgtaaat

SEQ ID NO: 207957 - DNA, 25 bp, Canis familiaris
ttcctgaggctgccattctctattg

SEQ ID NO: 207958 - DNA, 25 bp, Canis familiaris
ttgcctagtgctactcgttatgtga

SEQ ID NO: 207959 - DNA, 25 bp, Canis familiaris
ttgctgatcagggtctactccagtg

SEQ ID NO: 207960 - DNA, 25 bp, Canis familiaris
ttgctgacaggatgcagaaggagat

SEQ ID NO: 207961 - DNA, 25 bp, Canis familiaris
ttgcgctcggtgcgatactgatgat

SEQ ID NO: 207962 - DNA, 25 bp, Canis familiaris
ttggcctagtgccagttctgagaaa

SEQ ID NO: 207963 - DNA, 25 bp, Canis familiaris
ttgaaccatggccatttctgaagag

SEQ ID NO: 207964 - DNA, 25 bp, Canis familiaris
ttgaatgccgaagttactgacgagc

SEQ ID NO: 207965 - DNA, 25 bp, Canis familiaris
ttgcaacctatagttatgcccgaca

SEQ ID NO: 207966 - DNA, 25 bp, Canis familiaris
ttgaactctttgatgtctgcggaca

SEQ ID NO: 207967 - DNA, 25 bp, Canis familiaris
ttgaaatcctggagcatgccggcga

SEQ ID NO: 207968 - DNA, 25 bp, Canis familiaris
ttgatagaccggcttgccaggctgt

SEQ ID NO: 207969 - DNA, 25 bp, Canis familiaris
ttgcggactcggagttcactgctgt

SEQ ID NO: 207970 - DNA, 25 bp, Canis familiaris
ttgcccactaccagtgaacttgctt

SEQ ID NO: 207971 - DNA, 25 bp, Canis familiaris
ttgcccaacaccaagatgcgatctt

SEQ ID NO: 207972 - DNA, 25 bp, Canis familiaris
ttgccaagagcttgaagctcgacgt

SEQ ID NO: 207973 - DNA, 25 bp, Canis familiaris
ttgctcaagtcttgctagcacgcaa

SEQ ID NO: 207974 - DNA, 25 bp, Canis familiaris
ttgctctagacttcgagcaggagat

SEQ ID NO: 207975 - DNA, 25 bp, Canis familiaris
ttgctcatcgacctctagtggtgaa

SEQ ID NO: 207976 - DNA, 25 bp, Canis familiaris
ttcctcagaagtgactcgtatactc

SEQ ID NO: 207977 - DNA, 25 bp, Canis familiaris
ttcctctccagtgactgcagttact

SEQ ID NO: 207978 - DNA, 25 bp, Canis familiaris
ttcctcatccgtcccatagatgttg

SEQ ID NO: 207979 - DNA, 25 bp, Canis familiaris
ttcccctgtgtctcataggtctgta

SEQ ID NO: 207980 - DNA, 25 bp, Canis familiaris
ttccacttggccttcatagatcttg

SEQ ID NO: 207981 - DNA, 25 bp, Canis familiaris
ttgccatctaggtttgggatttgag

SEQ ID NO: 207982 - DNA, 25 bp, Canis familiaris
ttgcctcgggtctttgcattttatc

SEQ ID NO: 207983 - DNA, 25 bp, Canis familiaris
ttccacttggtgtttcctttagcac

SEQ ID NO: 207984 - DNA, 25 bp, Canis familiaris
ttgcccttgggatttttttgaacat

SEQ ID NO: 207985 - DNA, 25 bp, Canis familiaris
ttcctcttagtgtttcttctacttt

SEQ ID NO: 207986 - DNA, 25 bp, Canis familiaris
ttgctctttaagtcttctggaactg

SEQ ID NO: 207987 - DNA, 25 bp, Canis familiaris
ttccattctcaacctctctggaatg

SEQ ID NO: 207988 - DNA, 25 bp, Canis familiaris
ttgcagtaccagatccatcggatga

SEQ ID NO: 207989 - DNA, 25 bp, Canis familiaris
ttgcagttcggaaccttggctgggg

SEQ ID NO: 207990 - DNA, 25 bp, Canis familiaris
ttgacttcttccccaatggtggaga

SEQ ID NO: 207991 - DNA, 25 bp, Canis familiaris
ttgcagatactaacccttggtggac

SEQ ID NO: 207992 - DNA, 25 bp, Canis familiaris
ttgcaaaatgcaatacagttggaga

SEQ ID NO: 207993 - DNA, 25 bp, Canis familiaris
ttgccaactgccaatcatgttggac

SEQ ID NO: 207994 - DNA, 25 bp, Canis familiaris
ttgcctttacaattgttccacaaca

SEQ ID NO: 207995 - DNA, 25 bp, Canis familiaris
ttgcctgcttcttaatgattcccag

SEQ ID NO: 207996 - DNA, 25 bp, Canis familiaris
ttgactattttatcttccctaactg

SEQ ID NO: 207997 - DNA, 25 bp, Canis familiaris
ttgagtacattcaatacttccgaaa

SEQ ID NO: 207998 - DNA, 25 bp, Canis familiaris
ttgcctgatgcattgctcattattc

SEQ ID NO: 207999 - DNA, 25 bp, Canis familiaris
ttccagtcatgtcctccatatgtaa

SEQ ID NO: 208000 - DNA, 25 bp, Canis familiaris
ttccagctcatgcccttgacaggaa

SEQ ID NO: 208001 - DNA, 25 bp, Canis familiaris
ttgcccatcatctcttatgagcgga

SEQ ID NO: 208002 - DNA, 25 bp, Canis familiaris
ttcctcatcatcatcgtcgacagag

SEQ ID NO: 208003 - DNA, 25 bp, Canis familiaris
ttcctcatcatcatcgtcgacagag

SEQ ID NO: 208004 - DNA, 25 bp, Canis familiaris
ttcctcatcatcatcgtcgacagag

SEQ ID NO: 208005 - DNA, 25 bp, Canis familiaris
ttcctcatcatcatcgtcgacagag

SEQ ID NO: 208006 - DNA, 25 bp, Canis familiaris
ttcctcatcatcatcgtcgacagag

SEQ ID NO: 208007 - DNA, 25 bp, Canis familiaris
ttcctcatcatcatcgtcgacagag

SEQ ID NO: 208008 - DNA, 25 bp, Canis familiaris
ttcctctacttccatcagcaaagat

SEQ ID NO: 208009 - DNA, 25 bp, Canis familiaris
ttccactactgctaccacaactata

SEQ ID NO: 208010 - DNA, 25 bp, Canis familiaris
ttcctgctactcttggcactattat

SEQ ID NO: 208011 - DNA, 25 bp, Canis familiaris
ttccatccaaatttgccaatgtatt

SEQ ID NO: 208012 - DNA, 25 bp, Canis familiaris
ttccttcacagatttgcccagtctg

SEQ ID NO: 208013 - DNA, 25 bp, Canis familiaris
ttccttgacgatatctgcactggta

SEQ ID NO: 208014 - DNA, 25 bp, Canis familiaris
ttccttgcactgaacctgaagggta

SEQ ID NO: 208015 - DNA, 25 bp, Canis familiaris
ttcctgctcctactcggagagcgag

SEQ ID NO: 208016 - DNA, 25 bp, Canis familiaris
ttcctcacctgccacggagagaaga

SEQ ID NO: 208017 - DNA, 25 bp, Canis familiaris
ttcctggcctggtgtgacagagcaa

SEQ ID NO: 208018 - DNA, 25 bp, Canis familiaris
ttgccatcccgtggcgaacaacaag

SEQ ID NO: 208019 - DNA, 25 bp, Canis familiaris
ttggtctccgattcaaaggactgag

SEQ ID NO: 208020 - DNA, 25 bp, Canis familiaris
ttggcctggaaatgaacgactgaac

SEQ ID NO: 208021 - DNA, 25 bp, Canis familiaris
ttgccctagatctcggtgcgagcga

SEQ ID NO: 208022 - DNA, 25 bp, Canis familiaris
ttgcctctggtcctgcaggagggta

SEQ ID NO: 208023 - DNA, 25 bp, Canis familiaris
ttgcctgtgtacctgagcgagacgg

SEQ ID NO: 208024 - DNA, 25 bp, Canis familiaris
ttgcttgagtactgcagcgtgcggc

SEQ ID NO: 208025 - DNA, 25 bp, Canis familiaris
ttgctgcggagatgagcgcctgctg

SEQ ID NO: 208026 - DNA, 25 bp, Canis familiaris
ttgcctgtgagcaaggctgcctggc

SEQ ID NO: 208027 - DNA, 25 bp, Canis familiaris
ttcctgcagagcagtgctcctggcc

SEQ ID NO: 208028 - DNA, 25 bp, Canis familiaris
ttcctcaattcaattcaattccggg

SEQ ID NO: 208029 - DNA, 25 bp, Canis familiaris
ttgttcaattccctaagtaccaggt

SEQ ID NO: 208030 - DNA, 25 bp, Canis familiaris
ttgttttccctaacagcaactggtt

SEQ ID NO: 208031 - DNA, 25 bp, Canis familiaris
ttggttttcctgaggcacgtgtaga

SEQ ID NO: 208032 - DNA, 25 bp, Canis familiaris
ttgcggttacctctgtgtagtgtaa

SEQ ID NO: 208033 - DNA, 25 bp, Canis familiaris
ttgaggttacctctgggctttttgg

SEQ ID NO: 208034 - DNA, 25 bp, Canis familiaris
ttgactttaccccgtggaattggtg

SEQ ID NO: 208035 - DNA, 25 bp, Canis familiaris
ttgactcctcccaggtgtaagtgga

SEQ ID NO: 208036 - DNA, 25 bp, Canis familiaris
ttgcttcccccagggtgggagattg

SEQ ID NO: 208037 - DNA, 25 bp, Canis familiaris
ttgtggcccacctggggtgaggatt

SEQ ID NO: 208038 - DNA, 25 bp, Canis familiaris
ttgggccctggttggaggtggagtc

SEQ ID NO: 208039 - DNA, 25 bp, Canis familiaris
ttgctggcagttcgtgcttgaaatg

SEQ ID NO: 208040 - DNA, 25 bp, Canis familiaris
ttgctgtgcttcctggctttaaatt

SEQ ID NO: 208041 - DNA, 25 bp, Canis familiaris
ttgctgcttccttctgagtaaattt

SEQ ID NO: 208042 - DNA, 25 bp, Canis familiaris
ttcctctccttcaagtcagacttaa

SEQ ID NO: 208043 - DNA, 25 bp, Canis familiaris
ttcctctccctctagctagagttag

SEQ ID NO: 208044 - DNA, 25 bp, Canis familiaris
ttccatcctcctttgtatagttgtc

SEQ ID NO: 208045 - DNA, 25 bp, Canis familiaris
ttccactatcctaatgttcagctcc

SEQ ID NO: 208046 - DNA, 25 bp, Canis familiaris
ttccatctagctctgtgttaatccc

SEQ ID NO: 208047 - DNA, 25 bp, Canis familiaris
ttgccccgcatgcatgtgttcaaac

SEQ ID NO: 208048 - DNA, 25 bp, Canis familiaris
ttgctcccagtgcctgatggtgaag

SEQ ID NO: 208049 - DNA, 25 bp, Canis familiaris
ttgcgcccaatggacatatggaggg

SEQ ID NO: 208050 - DNA, 25 bp, Canis familiaris
ttgccactccacgacttggtgggac

SEQ ID NO: 208051 - DNA, 25 bp, Canis familiaris
ttccttcgctcagtttgttgggagc

SEQ ID NO: 208052 - DNA, 25 bp, Canis familiaris
ttccttcctctggtgtttatggtca

SEQ ID NO: 208053 - DNA, 25 bp, Canis familiaris
ttccactcacctgatatttaagtga

SEQ ID NO: 208054 - DNA, 25 bp, Canis familiaris
ttgcttcccctgaaccttgatggga

SEQ ID NO: 208055 - DNA, 25 bp, Canis familiaris
ttggcttggactcagccttttgcga

SEQ ID NO: 208056 - DNA, 25 bp, Canis familiaris
ttgcgccaaacacacgtcttgtggt

SEQ ID NO: 208057 - DNA, 25 bp, Canis familiaris
ttgcccagaactgatctcttttggt

SEQ ID NO: 208058 - DNA, 25 bp, Canis familiaris
ttcctcgagtcattttatttttgtt

SEQ ID NO: 208059 - DNA, 25 bp, Canis familiaris
ttgctctaactcgttctatttttac

SEQ ID NO: 208060 - DNA, 25 bp, Canis familiaris
ttgttaccttgtctggattttccct

SEQ ID NO: 208061 - DNA, 25 bp, Canis familiaris
ttgttactgtttctgttcattgccc

SEQ ID NO: 208062 - DNA, 25 bp, Canis familiaris
ttgcttcttttccttgttaatacct

SEQ ID NO: 208063 - DNA, 25 bp, Canis familiaris
ttgccctttagaacttaaataccat

SEQ ID NO: 208064 - DNA, 25 bp, Canis familiaris
ttgtgcctttaaacttacaccaaag

SEQ ID NO: 208065 - DNA, 25 bp, Canis familiaris
ttgctcctatccattttataaaata

SEQ ID NO: 208066 - DNA, 25 bp, Canis familiaris
ttgcgttatcattcttttgtaaata

SEQ ID NO: 208067 - DNA, 25 bp, Canis familiaris
ttgcctccatcttttttctgggtaa

SEQ ID NO: 208068 - DNA, 25 bp, Canis familiaris
ttgcctcatcggttttcctaattgt

SEQ ID NO: 208069 - DNA, 25 bp, Canis familiaris
ttccacacggacttttctctatgta

SEQ ID NO: 208070 - DNA, 25 bp, Canis familiaris
ttcctcaaagcctttttctcatcaa

SEQ ID NO: 208071 - DNA, 25 bp, Canis familiaris
ttgcccagaagctgtctgtccaaca

SEQ ID NO: 208072 - DNA, 25 bp, Canis familiaris
ttgccgatactccgtagttctacaa

SEQ ID NO: 208073 - DNA, 25 bp, Canis familiaris
ttgcctgaattactgatattttaga

SEQ ID NO: 208074 - DNA, 25 bp, Canis familiaris
ttccgactttctttgctggtcgacc

SEQ ID NO: 208075 - DNA, 25 bp, Canis familiaris
ttccagccttttttcatcgactgac

SEQ ID NO: 208076 - DNA, 25 bp, Canis familiaris
ttccacctgttggagtggcctctgg

SEQ ID NO: 208077 - DNA, 25 bp, Canis familiaris
ttgcccccatttagattgcagtctg

SEQ ID NO: 208078 - DNA, 25 bp, Canis familiaris
ttgccctgcttgcttgatggtgatt

SEQ ID NO: 208079 - DNA, 25 bp, Canis familiaris
ttgccttgttgcctattgtggcctc

SEQ ID NO: 208080 - DNA, 25 bp, Canis familiaris
ttgcctggttgcccaaatagcactt

SEQ ID NO: 208081 - DNA, 25 bp, Canis familiaris
ttgctcttggctactaaatagctgc

SEQ ID NO: 208082 - DNA, 25 bp, Canis familiaris
ttgcccttgcgcatcagaagcgtga

SEQ ID NO: 208083 - DNA, 25 bp, Canis familiaris
ttcctcttggctcccaggaggaggg

SEQ ID NO: 208084 - DNA, 25 bp, Canis familiaris
ttgtctcattttcccaggggtgggt

SEQ ID NO: 208085 - DNA, 25 bp, Canis familiaris
ttgtttttattctggggtgtgtgtg

SEQ ID NO: 208086 - DNA, 25 bp, Canis familiaris
ttcctttgtttctctggctttattg

SEQ ID NO: 208087 - DNA, 25 bp, Canis familiaris
ttcctattcttttttttcctatgtg

SEQ ID NO: 208088 - DNA, 25 bp, Canis familiaris
ttccttcctttaattttagcaactg

SEQ ID NO: 208089 - DNA, 25 bp, Canis familiaris
ttgcccgccttattgagttctacaa

SEQ ID NO: 208090 - DNA, 25 bp, Canis familiaris
ttgcccgcttggtcaagtcttacga

SEQ ID NO: 208091 - DNA, 25 bp, Canis familiaris
ttccaggcttttaggcattaaccac

SEQ ID NO: 208092 - DNA, 25 bp, Canis familiaris
ttgccgcgtgtttagtgttaagccc

SEQ ID NO: 208093 - DNA, 25 bp, Canis familiaris
ttccaggtgttttgtttccatcctc

SEQ ID NO: 208094 - DNA, 25 bp, Canis familiaris
ttccttgggttattgaaccatcctt

SEQ ID NO: 208095 - DNA, 25 bp, Canis familiaris
ttccttttgttctttaagtcctgtg

SEQ ID NO: 208096 - DNA, 25 bp, Canis familiaris
ttccttttgatttctctttgtacta

SEQ ID NO: 208097 - DNA, 25 bp, Canis familiaris
ttcctttggaatttttggcataaca

SEQ ID NO: 208098 - DNA, 25 bp, Canis familiaris
ttcctttcttatttttggattacat

SEQ ID NO: 208099 - DNA, 25 bp, Canis familiaris
ttgcctttgtattttttggatggaa

SEQ ID NO: 208100 - DNA, 25 bp, Canis familiaris
ttgaatcttgaactttttggaaata

SEQ ID NO: 208101 - DNA, 25 bp, Canis familiaris
ttgagactttataactttggattaa

SEQ ID NO: 208102 - DNA, 25 bp, Canis familiaris
ttgaccttattgtagcatttccttc

SEQ ID NO: 208103 - DNA, 25 bp, Canis familiaris
ttgaccttagcttgtactttcttaa

SEQ ID NO: 208104 - DNA, 25 bp, Canis familiaris
ttggccttacttcagtggcatttga

SEQ ID NO: 208105 - DNA, 25 bp, Canis familiaris
ttggttggaattcttggcttggccc

SEQ ID NO: 208106 - DNA, 25 bp, Canis familiaris
ttgaattgggttccctgctcatcag

SEQ ID NO: 208107 - DNA, 25 bp, Canis familiaris
ttcctgggaattctgtgatcatcag

SEQ ID NO: 208108 - DNA, 25 bp, Canis familiaris
ttccttggtcagtctttgtcatcat

SEQ ID NO: 208109 - DNA, 25 bp, Canis familiaris
ttcctatgtgctctgtgctttatat

SEQ ID NO: 208110 - DNA, 25 bp, Canis familiaris
ttcctggctcacaatggtctttatc

SEQ ID NO: 208111 - DNA, 25 bp, Canis familiaris
ttcctggcatctgtagttggcttca

SEQ ID NO: 208112 - DNA, 25 bp, Canis familiaris
ttcctggggacatgtgggcttcaat

SEQ ID NO: 208113 - DNA, 25 bp, Canis familiaris
ttcctggggacactgtcctcttcaa

SEQ ID NO: 208114 - DNA, 25 bp, Canis familiaris
ttgtttgggacgctgccatcgtcct

SEQ ID NO: 208115 - DNA, 25 bp, Canis familiaris
ttgtctatgggagggggctgcgcca

SEQ ID NO: 208116 - DNA, 25 bp, Canis familiaris
ttgtgttggtcctgggagtgtcgtg

SEQ ID NO: 208117 - DNA, 25 bp, Canis familiaris
ttgttacgtgcctgggcgtgtatag

SEQ ID NO: 208118 - DNA, 25 bp, Canis familiaris
ttgtatacttcctggcatgggctct

SEQ ID NO: 208119 - DNA, 25 bp, Canis familiaris
ttgacagattcctgggatgaatgca

SEQ ID NO: 208120 - DNA, 25 bp, Canis familiaris
ttgatctaatcctgggctaatgaag

SEQ ID NO: 208121 - DNA, 25 bp, Canis familiaris
ttccacaatccatcccatatataag

SEQ ID NO: 208122 - DNA, 25 bp, Canis familiaris
ttccagcaaggacacagcatattca

SEQ ID NO: 208123 - DNA, 25 bp, Canis familiaris
ttgccagaatggtccccatactgca

SEQ ID NO: 208124 - DNA, 25 bp, Canis familiaris
ttgccagagatgcttcgaaaggcaa

SEQ ID NO: 208125 - DNA, 25 bp, Canis familiaris
ttccaagatcatctcgtacgcgcaa

SEQ ID NO: 208126 - DNA, 25 bp, Canis familiaris
ttccacaatagcgacaatacacaga

SEQ ID NO: 208127 - DNA, 25 bp, Canis familiaris
ttgcgcacacaaggccagtatactg

SEQ ID NO: 208128 - DNA, 25 bp, Canis familiaris
ttgcagccacaacccattgtaaggg

SEQ ID NO: 208129 - DNA, 25 bp, Canis familiaris
ttgccgccacccaattgataagatg

SEQ ID NO: 208130 - DNA, 25 bp, Canis familiaris
ttcctgacacccatgtcaaggacct

SEQ ID NO: 208131 - DNA, 25 bp, Canis familiaris
ttcctcacaggctctgacaagggtt

SEQ ID NO: 208132 - DNA, 25 bp, Canis familiaris
ttcctgcacaaattctaaacctgtt

SEQ ID NO: 208133 - DNA, 25 bp, Canis familiaris
ttgcccaacgttgaaaccagtcctc

SEQ ID NO: 208134 - DNA, 25 bp, Canis familiaris
ttgctagaacagtaaaacccgtaca

SEQ ID NO: 208135 - DNA, 25 bp, Canis familiaris
ttgcttaagacccaaagtccccaca

SEQ ID NO: 208136 - DNA, 25 bp, Canis familiaris
ttgctaaaggacaaaactcatcccc

SEQ ID NO: 208137 - DNA, 25 bp, Canis familiaris
ttgctacaaggaaccacacacccac

SEQ ID NO: 208138 - DNA, 25 bp, Canis familiaris
ttccaaagtgcattaacccactccc

SEQ ID NO: 208139 - DNA, 25 bp, Canis familiaris
ttgcttcttgtaaaagcccgatccc

SEQ ID NO: 208140 - DNA, 25 bp, Canis familiaris
ttgcctataccaaaatcccgatctc

SEQ ID NO: 208141 - DNA, 25 bp, Canis familiaris
ttcctctattaacacacctgatcat

SEQ ID NO: 208142 - DNA, 25 bp, Canis familiaris
ttccttctataacaccagctatcta

SEQ ID NO: 208143 - DNA, 25 bp, Canis familiaris
ttcctgcatctttcacagttcagtt

SEQ ID NO: 208144 - DNA, 25 bp, Canis familiaris
ttccacactcattcacgttgtgtta

SEQ ID NO: 208145 - DNA, 25 bp, Canis familiaris
ttccacacagcacccagcgggtggt

SEQ ID NO: 208146 - DNA, 25 bp, Canis familiaris
ttcctctcagagcgagcagactttg

SEQ ID NO: 208147 - DNA, 25 bp, Canis familiaris
ttcctgtcagagctcagagcgcctc

SEQ ID NO: 208148 - DNA, 25 bp, Canis familiaris
ttgcctagcaagcgcaaggccctgg

SEQ ID NO: 208149 - DNA, 25 bp, Canis familiaris
ttgcttcacaagggacttgcccggg

SEQ ID NO: 208150 - DNA, 25 bp, Canis familiaris
ttccatcctatgtatctttgtcaaa

SEQ ID NO: 208151 - DNA, 25 bp, Canis familiaris
ttccactatgtgcttctcaataagg

SEQ ID NO: 208152 - DNA, 25 bp, Canis familiaris
ttccttctgtgcctttcaatacaaa

SEQ ID NO: 208153 - DNA, 25 bp, Canis familiaris
ttcctggctgctggcttttatgaaa

SEQ ID NO: 208154 - DNA, 25 bp, Canis familiaris
ttcctggtgtccttgctcaagaaga

SEQ ID NO: 208155 - DNA, 25 bp, Canis familiaris
ttccatctttcctgatcacaacgag

SEQ ID NO: 208156 - DNA, 25 bp, Canis familiaris
ttgccttttctcttgcagcaacagc

SEQ ID NO: 208157 - DNA, 25 bp, Canis familiaris
ttccttctttcaatcatactcagtt

SEQ ID NO: 208158 - DNA, 25 bp, Canis familiaris
ttccttcttgttatctcattgagct

SEQ ID NO: 208159 - DNA, 25 bp, Canis familiaris
ttgcctgtcttcatcaggtttgcct

SEQ ID NO: 208160 - DNA, 25 bp, Canis familiaris
ttgcctgtgcctgtacgattatgct

SEQ ID NO: 208161 - DNA, 25 bp, Canis familiaris
ttgccgggctgttcattgtcatggc

SEQ ID NO: 208162 - DNA, 25 bp, Canis familiaris
ttgccggtctgtgcgtgatgagcgc

SEQ ID NO: 208163 - DNA, 25 bp, Canis familiaris
ttggggtcgtgagatcgagccccgc

SEQ ID NO: 208164 - DNA, 25 bp, Canis familiaris
ttgtgggcggtgatttgagtcctcc

SEQ ID NO: 208165 - DNA, 25 bp, Canis familiaris
ttgttgggcccaggttggacttgcc

SEQ ID NO: 208166 - DNA, 25 bp, Canis familiaris
ttgttggcgtgcctggtttactggg

SEQ ID NO: 208167 - DNA, 25 bp, Canis familiaris
ttgtctggctggcttggtgccaggg

SEQ ID NO: 208168 - DNA, 25 bp, Canis familiaris
ttgtccactgggatggcagctgggc

SEQ ID NO: 208169 - DNA, 25 bp, Canis familiaris
ttgcttcttgggttaggctgtggct

SEQ ID NO: 208170 - DNA, 25 bp, Canis familiaris
ttgcttattggttgtactcacttct

SEQ ID NO: 208171 - DNA, 25 bp, Canis familiaris
ttgctttttgcaaacatctcactct

SEQ ID NO: 208172 - DNA, 25 bp, Canis familiaris
ttgttctctctagaaaatccttggg

SEQ ID NO: 208173 - DNA, 25 bp, Canis familiaris
ttggttcctaaagcctcctaaggct

SEQ ID NO: 208174 - DNA, 25 bp, Canis familiaris
ttgtttcgtggaatccttccataga

SEQ ID NO: 208175 - DNA, 25 bp, Canis familiaris
ttgctttggggacctttgccagaca

SEQ ID NO: 208176 - DNA, 25 bp, Canis familiaris
ttgctttagagccaattttgtaatc

SEQ ID NO: 208177 - DNA, 25 bp, Canis familiaris
ttgatttaatcaccatacttattta

SEQ ID NO: 208178 - DNA, 25 bp, Canis familiaris
ttgaacttccagcaactttctgtgg

SEQ ID NO: 208179 - DNA, 25 bp, Canis familiaris
ttgagcctttgagaactttcgtccc

SEQ ID NO: 208180 - DNA, 25 bp, Canis familiaris
ttggtccctggaaactttgagtctc

SEQ ID NO: 208181 - DNA, 25 bp, Canis familiaris
ttgagtcccttaagacagaggcagt

SEQ ID NO: 208182 - DNA, 25 bp, Canis familiaris
ttgtgtccctgtcatgaaagagtgt

SEQ ID NO: 208183 - DNA, 25 bp, Canis familiaris
ttgaccactcttcagagatcggata

SEQ ID NO: 208184 - DNA, 25 bp, Canis familiaris
ttgaacagctttctgaatctgcgaa

SEQ ID NO: 208185 - DNA, 25 bp, Canis familiaris
ttgccaactattatgaactccaaca

SEQ ID NO: 208186 - DNA, 25 bp, Canis familiaris
ttgccacaccaaatggagagcccag

SEQ ID NO: 208187 - DNA, 25 bp, Canis familiaris
ttgcccacctttcgatgaacacaag

SEQ ID NO: 208188 - DNA, 25 bp, Canis familiaris
ttgcccacctgttgaccaacaacaa

SEQ ID NO: 208189 - DNA, 25 bp, Canis familiaris
ttgctccccagttgtcgattgaact

SEQ ID NO: 208190 - DNA, 25 bp, Canis familiaris
ttgctcactttttgctgggagtatt

SEQ ID NO: 208191 - DNA, 25 bp, Canis familiaris
ttccatgccttggtctggggtgata

SEQ ID NO: 208192 - DNA, 25 bp, Canis familiaris
ttcctctcctgaatcggggatgaca

SEQ ID NO: 208193 - DNA, 25 bp, Canis familiaris
ttcctcccactttgtgcagtgagaa

SEQ ID NO: 208194 - DNA, 25 bp, Canis familiaris
ttcctcgccatcattgcggtggaga

SEQ ID NO: 208195 - DNA, 25 bp, Canis familiaris
ttcctctcctcaatgacctgtgagg

SEQ ID NO: 208196 - DNA, 25 bp, Canis familiaris
ttcctctcacatatgcacttttggt

SEQ ID NO: 208197 - DNA, 25 bp, Canis familiaris
ttcctctgcacatctacttgcttaa

SEQ ID NO: 208198 - DNA, 25 bp, Canis familiaris
ttgccctcaatgaccactttgtcaa

SEQ ID NO: 208199 - DNA, 25 bp, Canis familiaris
ttgcctcacacaaccacttatgtta

SEQ ID NO: 208200 - DNA, 25 bp, Canis familiaris
ttcctcacagtcccactgtgcaggt

SEQ ID NO: 208201 - DNA, 25 bp, Canis familiaris
ttgcctccattcccatgtgggaggc

SEQ ID NO: 208202 - DNA, 25 bp, Canis familiaris
ttccactactctctgctgagacagg

SEQ ID NO: 208203 - DNA, 25 bp, Canis familiaris
ttccagcctctcagtctcagaagag

SEQ ID NO: 208204 - DNA, 25 bp, Canis familiaris
ttccagccttccttcctgggcatgg

SEQ ID NO: 208205 - DNA, 25 bp, Canis familiaris
ttccagccttccttcttgggtatgg

SEQ ID NO: 208206 - DNA, 25 bp, Canis familiaris
ttccacctctttgcctgtaggatgt

SEQ ID NO: 208207 - DNA, 25 bp, Canis familiaris
ttcctctttaatcccattatgaatg

SEQ ID NO: 208208 - DNA, 25 bp, Canis familiaris
ttgccagttcatttccgttcgaatg

SEQ ID NO: 208209 - DNA, 25 bp, Canis familiaris
ttgcttttggatatggttgctaatg

SEQ ID NO: 208210 - DNA, 25 bp, Canis familiaris
ttccttgactctctgtgttgtacat

SEQ ID NO: 208211 - DNA, 25 bp, Canis familiaris
ttccttgagtcacctaattatacat

SEQ ID NO: 208212 - DNA, 25 bp, Canis familiaris
ttgattgctgagtcacttaattaga

SEQ ID NO: 208213 - DNA, 25 bp, Canis familiaris
ttgcctgcagtgtcacctacaagaa

SEQ ID NO: 208214 - DNA, 25 bp, Canis familiaris
ttcctgccatagtccaagcacagta

SEQ ID NO: 208215 - DNA, 25 bp, Canis familiaris
ttggcatctccgtacgtgaatgtga

SEQ ID NO: 208216 - DNA, 25 bp, Canis familiaris
ttgcctcatctctgatctttagtga

SEQ ID NO: 208217 - DNA, 25 bp, Canis familiaris
ttgcctcactcctagcttggaaatt

SEQ ID NO: 208218 - DNA, 25 bp, Canis familiaris
ttgcacaactgctttagggataatt

SEQ ID NO: 208219 - DNA, 25 bp, Canis familiaris
ttgagatacacacttcagggacaag

SEQ ID NO: 208220 - DNA, 25 bp, Canis familiaris
ttgtaaaagttccgtgcaccaaccg

SEQ ID NO: 208221 - DNA, 25 bp, Canis familiaris
ttgtacagaaatacggtccgaaacg

SEQ ID NO: 208222 - DNA, 25 bp, Canis familiaris
ttgatacctcaaacgtgtccgtcca

SEQ ID NO: 208223 - DNA, 25 bp, Canis familiaris
ttgaatcttccaactgagtacagtt

SEQ ID NO: 208224 - DNA, 25 bp, Canis familiaris
ttgaactgtagcaccaaaatgtttg

SEQ ID NO: 208225 - DNA, 25 bp, Canis familiaris
ttgtgacttcaattcctaattcttt

SEQ ID NO: 208226 - DNA, 25 bp, Canis familiaris
ttgtgcagttccttggctactgttt

SEQ ID NO: 208227 - DNA, 25 bp, Canis familiaris
ttgctacttagctgtttgtgtttca

SEQ ID NO: 208228 - DNA, 25 bp, Canis familiaris
ttgccctcagagtagaattgttttg

SEQ ID NO: 208229 - DNA, 25 bp, Canis familiaris
ttgcccactgggccaaatgtatttg

SEQ ID NO: 208230 - DNA, 25 bp, Canis familiaris
ttgtgtcacctccagaaagtatttg

SEQ ID NO: 208231 - DNA, 25 bp, Canis familiaris
ttgattgccccaatgaaggctcatt

SEQ ID NO: 208232 - DNA, 25 bp, Canis familiaris
ttgttgccgacacagagtgctctgc

SEQ ID NO: 208233 - DNA, 25 bp, Canis familiaris
ttcctgccagaacagatgctctcga

SEQ ID NO: 208234 - DNA, 25 bp, Canis familiaris
ttgccccaggatggagcctcctggc

SEQ ID NO: 208235 - DNA, 25 bp, Canis familiaris
ttcctccggatgacgtctcaggatg

SEQ ID NO: 208236 - DNA, 25 bp, Canis familiaris
ttccttgggtgtggacctgggcaaa

SEQ ID NO: 208237 - DNA, 25 bp, Canis familiaris
ttcctcgcccgaagagcgcgggaca

SEQ ID NO: 208238 - DNA, 25 bp, Canis familiaris
ttccaggcgcggaagccggggaaga

SEQ ID NO: 208239 - DNA, 25 bp, Canis familiaris
ttggctcgccggatacggggagaga

SEQ ID NO: 208240 - DNA, 25 bp, Canis familiaris
ttgcccttcgctgaactggggacta

SEQ ID NO: 208241 - DNA, 25 bp, Canis familiaris
ttgcctttcctctccaagaggacaa

SEQ ID NO: 208242 - DNA, 25 bp, Canis familiaris
ttgctcatcttcgtgtgacgacgaa

SEQ ID NO: 208243 - DNA, 25 bp, Canis familiaris
ttgctcatttcctttagcctatcac

SEQ ID NO: 208244 - DNA, 25 bp, Canis familiaris
ttgcattttccacttaacaatacag

SEQ ID NO: 208245 - DNA, 25 bp, Canis familiaris
ttgctttctatgctctataacttga

SEQ ID NO: 208246 - DNA, 25 bp, Canis familiaris
ttgcatctcctcaggcaaaagtgga

SEQ ID NO: 208247 - DNA, 25 bp, Canis familiaris
ttgttgctgctgtgccaaagagtgg

SEQ ID NO: 208248 - DNA, 25 bp, Canis familiaris
ttgtccctgtagcctacacagtgta

SEQ ID NO: 208249 - DNA, 25 bp, Canis familiaris
ttgatccgcttttctacactggaca

SEQ ID NO: 208250 - DNA, 25 bp, Canis familiaris
ttgcttcgctgaatatatacaggta

SEQ ID NO: 208251 - DNA, 25 bp, Canis familiaris
ttgtaagatgagatgaaaggcaggc

SEQ ID NO: 208252 - DNA, 25 bp, Canis familiaris
ttgctggagaacatggacggagcct

SEQ ID NO: 208253 - DNA, 25 bp, Canis familiaris
ttgctgcgggcaggctggaacgagc

SEQ ID NO: 208254 - DNA, 25 bp, Canis familiaris
ttgatgctgggctctgaggacgtct

SEQ ID NO: 208255 - DNA, 25 bp, Canis familiaris
ttgacgtgctggactgtggacacct

SEQ ID NO: 208256 - DNA, 25 bp, Canis familiaris
ttgcacgttttcgggcaaccttagc

SEQ ID NO: 208257 - DNA, 25 bp, Canis familiaris
ttgccttgctttggagagaacactt

SEQ ID NO: 208258 - DNA, 25 bp, Canis familiaris
ttgccccttgtgggtgtcagcaatt

SEQ ID NO: 208259 - DNA, 25 bp, Canis familiaris
ttgccgccattggggatcgcagcaa

SEQ ID NO: 208260 - DNA, 25 bp, Canis familiaris
ttgcctgcattaccggtcgatgcaa

SEQ ID NO: 208261 - DNA, 25 bp, Canis familiaris
ttgcccattttggaggcggcacagg

SEQ ID NO: 208262 - DNA, 25 bp, Canis familiaris
ttgcccttgtggttggtgagccggg

SEQ ID NO: 208263 - DNA, 25 bp, Canis familiaris
ttggatcttgggatcggttcgggcg

SEQ ID NO: 208264 - DNA, 25 bp, Canis familiaris
ttggactggtggaacaggtgctcgg

SEQ ID NO: 208265 - DNA, 25 bp, Canis familiaris
ttggcaatgcagaagcttcggtctc

SEQ ID NO: 208266 - DNA, 25 bp, Canis familiaris
ttgccataaatggctcgtggctgct

SEQ ID NO: 208267 - DNA, 25 bp, Canis familiaris
ttgccattattggctcgtggctgct

SEQ ID NO: 208268 - DNA, 25 bp, Canis familiaris
ttccatctgatatgcatttagtcta

SEQ ID NO: 208269 - DNA, 25 bp, Canis familiaris
ttccatcagattcccttggatccat

SEQ ID NO: 208270 - DNA, 25 bp, Canis familiaris
ttccactgcaccactattgatgtca

SEQ ID NO: 208271 - DNA, 25 bp, Canis familiaris
ttcctccccaccaattgatgataag

SEQ ID NO: 208272 - DNA, 25 bp, Canis familiaris
ttgctttccccattgacgatgatga

SEQ ID NO: 208273 - DNA, 25 bp, Canis familiaris
ttgttctgaccctaccagatgcgaa

SEQ ID NO: 208274 - DNA, 25 bp, Canis familiaris
ttgctttgagtgaatacctaggata

SEQ ID NO: 208275 - DNA, 25 bp, Canis familiaris
ttgctgtcgattaagaccggagctt

SEQ ID NO: 208276 - DNA, 25 bp, Canis familiaris
ttgccgctgttcgagacgggcagtt

SEQ ID NO: 208277 - DNA, 25 bp, Canis familiaris
ttgcgtatgtgtaaaagggtgtgtt

SEQ ID NO: 208278 - DNA, 25 bp, Canis familiaris
ttgcaatgcatcaataaaatgggta

SEQ ID NO: 208279 - DNA, 25 bp, Canis familiaris
ttgattcatctgtaaaagggtctag

SEQ ID NO: 208280 - DNA, 25 bp, Canis familiaris
ttgactcaggagcagaagtttcaac

SEQ ID NO: 208281 - DNA, 25 bp, Canis familiaris
ttgcctcaggtcctcaagtgatcta

SEQ ID NO: 208282 - DNA, 25 bp, Canis familiaris
ttgccatctggagttgaagcgacca

SEQ ID NO: 208283 - DNA, 25 bp, Canis familiaris
ttgccacgtgatgcagaagcctcca

SEQ ID NO: 208284 - DNA, 25 bp, Canis familiaris
ttccacctgtcaagttgcccaagtg

SEQ ID NO: 208285 - DNA, 25 bp, Canis familiaris
ttccatccagatcttactccaagtt

SEQ ID NO: 208286 - DNA, 25 bp, Canis familiaris
ttccattgtatgcttataccacatt

SEQ ID NO: 208287 - DNA, 25 bp, Canis familiaris
ttccatacatatgatttcacttctt

SEQ ID NO: 208288 - DNA, 25 bp, Canis familiaris
ttccttgcatattataatcctccta

SEQ ID NO: 208289 - DNA, 25 bp, Canis familiaris
ttccttcattgaataggcttcctga

SEQ ID NO: 208290 - DNA, 25 bp, Canis familiaris
ttccttgttaaaactctcctgttct

SEQ ID NO: 208291 - DNA, 25 bp, Canis familiaris
ttccttgtctaatatcttcatttcc

SEQ ID NO: 208292 - DNA, 25 bp, Canis familiaris
ttccttactggaagcatcttgcttt

SEQ ID NO: 208293 - DNA, 25 bp, Canis familiaris
ttcctttcttcaagacattgctttg

SEQ ID NO: 208294 - DNA, 25 bp, Canis familiaris
ttcctattcattttagtcgcttctg

SEQ ID NO: 208295 - DNA, 25 bp, Canis familiaris
ttccacatttatttttctttcatgt

SEQ ID NO: 208296 - DNA, 25 bp, Canis familiaris
ttccactttcttttgattctacata

SEQ ID NO: 208297 - DNA, 25 bp, Canis familiaris
ttccatctatccttttattcacaat

SEQ ID NO: 208298 - DNA, 25 bp, Canis familiaris
ttcctctgtgtcttctctattacag

SEQ ID NO: 208299 - DNA, 25 bp, Canis familiaris
ttgctcacaggtctcttaatcacac

SEQ ID NO: 208300 - DNA, 25 bp, Canis familiaris
ttccaggggccattgctgagagcca

SEQ ID NO: 208301 - DNA, 25 bp, Canis familiaris
ttgccagcagggaaactgaggccca

SEQ ID NO: 208302 - DNA, 25 bp, Canis familiaris
ttgccagagaggctcctgaggccaa

SEQ ID NO: 208303 - DNA, 25 bp, Canis familiaris
ttgctcaatgactttcactcaggcc

SEQ ID NO: 208304 - DNA, 25 bp, Canis familiaris
ttgacagtgaagatcctcgggagag

SEQ ID NO: 208305 - DNA, 25 bp, Canis familiaris
ttgaggctgaagttcctgctgtaaa

SEQ ID NO: 208306 - DNA, 25 bp, Canis familiaris
ttgcattgtaagttgcccaataaaa

SEQ ID NO: 208307 - DNA, 25 bp, Canis familiaris
ttgcctctcatatttccctaataaa

SEQ ID NO: 208308 - DNA, 25 bp, Canis familiaris
ttgcctgccatgtttccagaattcg

SEQ ID NO: 208309 - DNA, 25 bp, Canis familiaris
ttgcccaagtattctcagatatgat

SEQ ID NO: 208310 - DNA, 25 bp, Canis familiaris
ttgccctcagtattgatagcagtat

SEQ ID NO: 208311 - DNA, 25 bp, Canis familiaris
ttgacaagcagtacatgatagtgta

SEQ ID NO: 208312 - DNA, 25 bp, Canis familiaris
ttgcacacagcacaatgccgggcac

SEQ ID NO: 208313 - DNA, 25 bp, Canis familiaris
ttgcaacagcagcgcgggggctggc

SEQ ID NO: 208314 - DNA, 25 bp, Canis familiaris
ttgcatgacagctccagcagggagc

SEQ ID NO: 208315 - DNA, 25 bp, Canis familiaris
ttgatgaagttcgcactggcaccta

SEQ ID NO: 208316 - DNA, 25 bp, Canis familiaris
ttgatgaagttcgcactggcaccta

SEQ ID NO: 208317 - DNA, 25 bp, Canis familiaris
ttgatgaagttcgcactggcaccta

SEQ ID NO: 208318 - DNA, 25 bp, Canis familiaris
ttgatgaagttcgcactggcaccta

SEQ ID NO: 208319 - DNA, 25 bp, Canis familiaris
ttgcaaggtcgcgatcacatctacc

SEQ ID NO: 208320 - DNA, 25 bp, Canis familiaris
ttgaagagactgtctttcttccaat

SEQ ID NO: 208321 - DNA, 25 bp, Canis familiaris
ttgccaagaatgttttcattaatca

SEQ ID NO: 208322 - DNA, 25 bp, Canis familiaris
ttgcccagccaactttactattata

SEQ ID NO: 208323 - DNA, 25 bp, Canis familiaris
ttgaccaggacactttttgacttat

SEQ ID NO: 208324 - DNA, 25 bp, Canis familiaris
ttgtgccaaacagtgcttctggccg

SEQ ID NO: 208325 - DNA, 25 bp, Canis familiaris
ttgctgaatagaatctggtgcttcc

SEQ ID NO: 208326 - DNA, 25 bp, Canis familiaris
ttgctgtctgagcttgagcctcaca

SEQ ID NO: 208327 - DNA, 25 bp, Canis familiaris
ttgtgccagcagtgatatactcctg

SEQ ID NO: 208328 - DNA, 25 bp, Canis familiaris
ttggctctcagtttgaactccgtaa

SEQ ID NO: 208329 - DNA, 25 bp, Canis familiaris
ttgtctgtatatgctaactccgttg

SEQ ID NO: 208330 - DNA, 25 bp, Canis familiaris
ttgtcggatttccatcctccgacta

SEQ ID NO: 208331 - DNA, 25 bp, Canis familiaris
ttgtaggatccccactgatcctggg

SEQ ID NO: 208332 - DNA, 25 bp, Canis familiaris
ttgtagaccccaccaatttgtgcga

SEQ ID NO: 208333 - DNA, 25 bp, Canis familiaris
ttgataggccccaacacttgttcaa

SEQ ID NO: 208334 - DNA, 25 bp, Canis familiaris
ttgatacccaaaatgcaccttgtaa

SEQ ID NO: 208335 - DNA, 25 bp, Canis familiaris
ttgacaccttttagacctgtatgaa

SEQ ID NO: 208336 - DNA, 25 bp, Canis familiaris
ttgtcctgcttactgaggtcttgga

SEQ ID NO: 208337 - DNA, 25 bp, Canis familiaris
ttgcttgtcctcctggtattgggat

SEQ ID NO: 208338 - DNA, 25 bp, Canis familiaris
ttgttgccgcgattggagaagggat

SEQ ID NO: 208339 - DNA, 25 bp, Canis familiaris
ttgaagccctcatttagacagaggt

SEQ ID NO: 208340 - DNA, 25 bp, Canis familiaris
ttgaagctgttctgtagcctctggc

SEQ ID NO: 208341 - DNA, 25 bp, Canis familiaris
ttggactattcagggagtcgcaaat

SEQ ID NO: 208342 - DNA, 25 bp, Canis familiaris
ttggacaatgtccacaaggaccaat

SEQ ID NO: 208343 - DNA, 25 bp, Canis familiaris
ttggacatgtccacaaggacccatt

SEQ ID NO: 208344 - DNA, 25 bp, Canis familiaris
ttgaggagcaaggccaagttcccag

SEQ ID NO: 208345 - DNA, 25 bp, Canis familiaris
ttggccagcaagggcaaggtctcca

SEQ ID NO: 208346 - DNA, 25 bp, Canis familiaris
ttccaccagacccatgagtgttctc

SEQ ID NO: 208347 - DNA, 25 bp, Canis familiaris
ttgacaaatacccagaggtcctcca

SEQ ID NO: 208348 - DNA, 25 bp, Canis familiaris
ttgccaaataagggcctgctcctcg

SEQ ID NO: 208349 - DNA, 25 bp, Canis familiaris
ttgccaaaggagggctcgtacccgc

SEQ ID NO: 208350 - DNA, 25 bp, Canis familiaris
ttccaagagaggggccgtcagtcca

SEQ ID NO: 208351 - DNA, 25 bp, Canis familiaris
ttcctaggagaggcccagtgctggc

SEQ ID NO: 208352 - DNA, 25 bp, Canis familiaris
ttgtgccaacgggccaaggtggcca

SEQ ID NO: 208353 - DNA, 25 bp, Canis familiaris
ttgtttgcctgggcccaggattgga

SEQ ID NO: 208354 - DNA, 25 bp, Canis familiaris
ttgtttcactggttccgtgtttgac

SEQ ID NO: 208355 - DNA, 25 bp, Canis familiaris
ttgctttcagctggttggaatcttt

SEQ ID NO: 208356 - DNA, 25 bp, Canis familiaris
ttgcttatctgctcttggcatgcac

SEQ ID NO: 208357 - DNA, 25 bp, Canis familiaris
ttgcaaatctgtgctctggtcctga

SEQ ID NO: 208358 - DNA, 25 bp, Canis familiaris
ttgccagcatctttgcctggacacg

SEQ ID NO: 208359 - DNA, 25 bp, Canis familiaris
ttgccagtgctttcacaggacaaca

SEQ ID NO: 208360 - DNA, 25 bp, Canis familiaris
ttgctccagtgttacaggaaaacag

SEQ ID NO: 208361 - DNA, 25 bp, Canis familiaris
ttgatgccggtgaacgtgcaaaaca

SEQ ID NO: 208362 - DNA, 25 bp, Canis familiaris
ttggcataggggacggcaacctgca

SEQ ID NO: 208363 - DNA, 25 bp, Canis familiaris
ttgtatgtgggcgtgcgtgaacctc

SEQ ID NO: 208364 - DNA, 25 bp, Canis familiaris
ttgtctgtggaactgactctacacc

SEQ ID NO: 208365 - DNA, 25 bp, Canis familiaris
ttgccttgtgcatctatgttaacct

SEQ ID NO: 208366 - DNA, 25 bp, Canis familiaris
ttgacttggtgacagttcagccctc

SEQ ID NO: 208367 - DNA, 25 bp, Canis familiaris
ttgcaggtgcctggtgagttaccct

SEQ ID NO: 208368 - DNA, 25 bp, Canis familiaris
ttgcatggcgcgcgatagttaccca

SEQ ID NO: 208369 - DNA, 25 bp, Canis familiaris
ttgattggggtgcagcttccccagc

SEQ ID NO: 208370 - DNA, 25 bp, Canis familiaris
ttgttggtgttccagttggcagccc

SEQ ID NO: 208371 - DNA, 25 bp, Canis familiaris
ttgtctgtgtggacacggggtgccc

SEQ ID NO: 208372 - DNA, 25 bp, Canis familiaris
ttgcctgggcagatgggctgggcca

SEQ ID NO: 208373 - DNA, 25 bp, Canis familiaris
ttgggagagcagaggggggccaccc

SEQ ID NO: 208374 - DNA, 25 bp, Canis familiaris
ttggagtatcagaggcagtagtgca

SEQ ID NO: 208375 - DNA, 25 bp, Canis familiaris
ttgacagtgcacctggtccatttca

SEQ ID NO: 208376 - DNA, 25 bp, Canis familiaris
ttgaatgtctcattaggcctttccc

SEQ ID NO: 208377 - DNA, 25 bp, Canis familiaris
ttgcattgtcaattagaggctcaag

SEQ ID NO: 208378 - DNA, 25 bp, Canis familiaris
ttgcactctccattgcagagggggg

SEQ ID NO: 208379 - DNA, 25 bp, Canis familiaris
ttgctgctccatctcaaggaagtgg

SEQ ID NO: 208380 - DNA, 25 bp, Canis familiaris
ttgatgcccattacacagatgtaga

SEQ ID NO: 208381 - DNA, 25 bp, Canis familiaris
ttgcgcagtatgttcacatctgtgg

SEQ ID NO: 208382 - DNA, 25 bp, Canis familiaris
ttggagtgatgcccatgctcaatga

SEQ ID NO: 208383 - DNA, 25 bp, Canis familiaris
ttgaatgcaagctctccagaggtga

SEQ ID NO: 208384 - DNA, 25 bp, Canis familiaris
ttgaatggagccacctgcgtggacg

SEQ ID NO: 208385 - DNA, 25 bp, Canis familiaris
ttggatgaagacccccgaagactgg

SEQ ID NO: 208386 - DNA, 25 bp, Canis familiaris
ttgccatgtagaccccttgaagagg

SEQ ID NO: 208387 - DNA, 25 bp, Canis familiaris
ttgccagtaaccaccagaagctaag

SEQ ID NO: 208388 - DNA, 25 bp, Canis familiaris
ttccagaaattctccagcgattcgg

SEQ ID NO: 208389 - DNA, 25 bp, Canis familiaris
ttgggaaaacgcacggatctcggga

SEQ ID NO: 208390 - DNA, 25 bp, Canis familiaris
ttgggaagacaccaacgaggccctg

SEQ ID NO: 208391 - DNA, 25 bp, Canis familiaris
ttgccgaaacacgcaggacagccac

SEQ ID NO: 208392 - DNA, 25 bp, Canis familiaris
ttgttattaccttcggacagctctc

SEQ ID NO: 208393 - DNA, 25 bp, Canis familiaris
ttgattttgaccaacgtagctcctc

SEQ ID NO: 208394 - DNA, 25 bp, Canis familiaris
ttgcttttagtccacagtatgccct

SEQ ID NO: 208395 - DNA, 25 bp, Canis familiaris
ttgtttcagagaaccagcagtcccc

SEQ ID NO: 208396 - DNA, 25 bp, Canis familiaris
ttgtctgacaagagcatcaaccccc

SEQ ID NO: 208397 - DNA, 25 bp, Canis familiaris
ttgctcatactagcaagccaccacc

SEQ ID NO: 208398 - DNA, 25 bp, Canis familiaris
ttgccaaataactaggacccaaatt

SEQ ID NO: 208399 - DNA, 25 bp, Canis familiaris
ttgaaagattgttaccagcccaaat

SEQ ID NO: 208400 - DNA, 25 bp, Canis familiaris
ttgaaaacctacacctgctgcatat

SEQ ID NO: 208401 - DNA, 25 bp, Canis familiaris
ttgaagaacttggccccaatatgtt

SEQ ID NO: 208402 - DNA, 25 bp, Canis familiaris
ttgacatctagctcaacccaatggt

SEQ ID NO: 208403 - DNA, 25 bp, Canis familiaris
ttggctgatcaatccacccaaggtg

SEQ ID NO: 208404 - DNA, 25 bp, Canis familiaris
ttgatgtgtaacgacgcccaagggc

SEQ ID NO: 208405 - DNA, 25 bp, Canis familiaris
ttggttacaggactccatgtcagga

SEQ ID NO: 208406 - DNA, 25 bp, Canis familiaris
ttggcttagaaagtagattcgagga

SEQ ID NO: 208407 - DNA, 25 bp, Canis familiaris
ttgactgaatgaaagctagcaccga

SEQ ID NO: 208408 - DNA, 25 bp, Canis familiaris
ttgactacagtgagtactgggaagg

SEQ ID NO: 208409 - DNA, 25 bp, Canis familiaris
ttgtatatcctgacccctggaaagg

SEQ ID NO: 208410 - DNA, 25 bp, Canis familiaris
ttggaatcctgaactcgctttgtat

SEQ ID NO: 208411 - DNA, 25 bp, Canis familiaris
ttgcaaatgcccaactctcaagtta

SEQ ID NO: 208412 - DNA, 25 bp, Canis familiaris
ttgaaggcacaaatcaccaggttga

SEQ ID NO: 208413 - DNA, 25 bp, Canis familiaris
ttgaatgcccactcaaagtgctgta

SEQ ID NO: 208414 - DNA, 25 bp, Canis familiaris
ttccatcgtcacagaaagtgctgct

SEQ ID NO: 208415 - DNA, 25 bp, Canis familiaris
ttccttgcctcaagacactggcaca

SEQ ID NO: 208416 - DNA, 25 bp, Canis familiaris
ttccattcctgaaaactgtcatatc

SEQ ID NO: 208417 - DNA, 25 bp, Canis familiaris
ttccattcctcatagagcttctcaa

SEQ ID NO: 208418 - DNA, 25 bp, Canis familiaris
ttgtcattactctagaggcttttac

SEQ ID NO: 208419 - DNA, 25 bp, Canis familiaris
ttgctcacccacgagaagctgtttt

SEQ ID NO: 208420 - DNA, 25 bp, Canis familiaris
ttgatcctgccagtagcatatgctt

SEQ ID NO: 208421 - DNA, 25 bp, Canis familiaris
ttgagccctgcattgagctctgcac

SEQ ID NO: 208422 - DNA, 25 bp, Canis familiaris
ttgagctctgcatctgagcttgccc

SEQ ID NO: 208423 - DNA, 25 bp, Canis familiaris
ttgcagctgctattctagatgtggt

SEQ ID NO: 208424 - DNA, 25 bp, Canis familiaris
ttgcagctgtctctctgatgtgtgc

SEQ ID NO: 208425 - DNA, 25 bp, Canis familiaris
ttgagctgcatttcctgagtatcct

SEQ ID NO: 208426 - DNA, 25 bp, Canis familiaris
ttgtcgcatccaccagtgtatcagc

SEQ ID NO: 208427 - DNA, 25 bp, Canis familiaris
ttggccacaggcaaggtgacatgaa

SEQ ID NO: 208428 - DNA, 25 bp, Canis familiaris
ttggatcaatggggcagtcattaga

SEQ ID NO: 208429 - DNA, 25 bp, Canis familiaris
ttgaatcttgagtgatgtcagctga

SEQ ID NO: 208430 - DNA, 25 bp, Canis familiaris
ttgaactcaaggcatgatctctggt

SEQ ID NO: 208431 - DNA, 25 bp, Canis familiaris
ttgaaacaagtgcacctggctggcg

SEQ ID NO: 208432 - DNA, 25 bp, Canis familiaris
ttgataataaagcgcttgtttgcag

SEQ ID NO: 208433 - DNA, 25 bp, Canis familiaris
ttgatactaactcccttgttcacac

SEQ ID NO: 208434 - DNA, 25 bp, Canis familiaris
ttgctatcagaactctccttgtttc

SEQ ID NO: 208435 - DNA, 25 bp, Canis familiaris
ttgcagcacatatgtctcctttttc

SEQ ID NO: 208436 - DNA, 25 bp, Canis familiaris
ttgagcagcggggccgcattcatct

SEQ ID NO: 208437 - DNA, 25 bp, Canis familiaris
ttgagcaggaggcgccaatcatggc

SEQ ID NO: 208438 - DNA, 25 bp, Canis familiaris
ttgaagagagggcctcacctggggc

SEQ ID NO: 208439 - DNA, 25 bp, Canis familiaris
ttgacagactggaagcccttgtacg

SEQ ID NO: 208440 - DNA, 25 bp, Canis familiaris
ttgccgcctggatggcctattacat

SEQ ID NO: 208441 - DNA, 25 bp, Canis familiaris
ttgcctgccttatagacctgtacag

SEQ ID NO: 208442 - DNA, 25 bp, Canis familiaris
ttggctctgctttattgaccttaga

SEQ ID NO: 208443 - DNA, 25 bp, Canis familiaris
ttgagcgttttgtctcagtctacaa

SEQ ID NO: 208444 - DNA, 25 bp, Canis familiaris
ttgaggtcctgtcccatgggacagc

SEQ ID NO: 208445 - DNA, 25 bp, Canis familiaris
ttgcaggccctggaagcgtgagacc

SEQ ID NO: 208446 - DNA, 25 bp, Canis familiaris
ttgcagtctcctcaaattgggtcct

SEQ ID NO: 208447 - DNA, 25 bp, Canis familiaris
ttgcgttccacataacatggcgccg

SEQ ID NO: 208448 - DNA, 25 bp, Canis familiaris
ttggttcgcaatgaatcgtcactca

SEQ ID NO: 208449 - DNA, 25 bp, Canis familiaris
ttgactcctacataatcccaacaca

SEQ ID NO: 208450 - DNA, 25 bp, Canis familiaris
ttgaactcaagtataccccaacacc

SEQ ID NO: 208451 - DNA, 25 bp, Canis familiaris
ttgacccagaatatatgaccccact

SEQ ID NO: 208452 - DNA, 25 bp, Canis familiaris
ttgcaccctgggaatcagagaacca

SEQ ID NO: 208453 - DNA, 25 bp, Canis familiaris
ttgcctcctagccatcaaaatgacc

SEQ ID NO: 208454 - DNA, 25 bp, Canis familiaris
ttgcgctccttttcaaatgtcacca

SEQ ID NO: 208455 - DNA, 25 bp, Canis familiaris
ttgagccactcatttaaagtccgaa

SEQ ID NO: 208456 - DNA, 25 bp, Canis familiaris
ttgaccctagaatgggatcacgaag

SEQ ID NO: 208457 - DNA, 25 bp, Canis familiaris
ttgaccctaaggacctgatcagcct

SEQ ID NO: 208458 - DNA, 25 bp, Canis familiaris
ttgacccgaaatgcctgacacattc

SEQ ID NO: 208459 - DNA, 25 bp, Canis familiaris
ttgacctgctgagtgtggcgctgaa

SEQ ID NO: 208460 - DNA, 25 bp, Canis familiaris
ttgatcacgcttagtggtctcacac

SEQ ID NO: 208461 - DNA, 25 bp, Canis familiaris
ttgatgccctcaaagtagtaccgct

SEQ ID NO: 208462 - DNA, 25 bp, Canis familiaris
ttgagagcgagcaaaccagtacggc

SEQ ID NO: 208463 - DNA, 25 bp, Canis familiaris
ttgagagcaatgccatcacctgtac

SEQ ID NO: 208464 - DNA, 25 bp, Canis familiaris
ttgagacgacgtctgctgtcactga

SEQ ID NO: 208465 - DNA, 25 bp, Canis familiaris
ttgaccaactgttcctgttctggga

SEQ ID NO: 208466 - DNA, 25 bp, Canis familiaris
ttccacgactcttcttttgctggag

SEQ ID NO: 208467 - DNA, 25 bp, Canis familiaris
ttccactactacgttcttctgatga

SEQ ID NO: 208468 - DNA, 25 bp, Canis familiaris
ttccacatacactgggcacctgtga

SEQ ID NO: 208469 - DNA, 25 bp, Canis familiaris
ttgcccagaccaggggaccagtata

SEQ ID NO: 208470 - DNA, 25 bp, Canis familiaris
ttgggcagtccagggtggtcgtgga

SEQ ID NO: 208471 - DNA, 25 bp, Canis familiaris
ttggggccctgcaaggaggtatgga

SEQ ID NO: 208472 - DNA, 25 bp, Canis familiaris
ttggggtcactgggggttcagagcc

SEQ ID NO: 208473 - DNA, 25 bp, Canis familiaris
ttgcggctttctgtgggaaggaccc

SEQ ID NO: 208474 - DNA, 25 bp, Canis familiaris
ttggatctttctgtcggatgatgga

SEQ ID NO: 208475 - DNA, 25 bp, Canis familiaris
ttccatttcatctctctgttgttga

SEQ ID NO: 208476 - DNA, 25 bp, Canis familiaris
ttgcctgttttgcctcagtgtttga

SEQ ID NO: 208477 - DNA, 25 bp, Canis familiaris
ttgccttttgtgccctgattaggaa

SEQ ID NO: 208478 - DNA, 25 bp, Canis familiaris
ttgcctatttctgcctaatcatgta

SEQ ID NO: 208479 - DNA, 25 bp, Canis familiaris
ttgccttttgcaaactttattttca

SEQ ID NO: 208480 - DNA, 25 bp, Canis familiaris
ttgacttttatatatttatctccta

SEQ ID NO: 208481 - DNA, 25 bp, Canis familiaris
ttgaattttcaattggtttccgata

SEQ ID NO: 208482 - DNA, 25 bp, Canis familiaris
ttgaagaagtcatacgttcctcgta

SEQ ID NO: 208483 - DNA, 25 bp, Canis familiaris
ttgacgaagtagtttgtccccgcga

SEQ ID NO: 208484 - DNA, 25 bp, Canis familiaris
ttgcagtacagttttttcttccctt

SEQ ID NO: 208485 - DNA, 25 bp, Canis familiaris
ttgaccaccatatttttctttgcct

SEQ ID NO: 208486 - DNA, 25 bp, Canis familiaris
ttgaaaccagttcgttttctctgcc

SEQ ID NO: 208487 - DNA, 25 bp, Canis familiaris
ttggaagttttcattttcttacact

SEQ ID NO: 208488 - DNA, 25 bp, Canis familiaris
ttggaaggtttcatgtattctaaca

SEQ ID NO: 208489 - DNA, 25 bp, Canis familiaris
ttggaaagttccaagtctttacatt

SEQ ID NO: 208490 - DNA, 25 bp, Canis familiaris
ttccaacatgtgacctttctttaac

SEQ ID NO: 208491 - DNA, 25 bp, Canis familiaris
ttgccaaagctacctttcgtgttga

SEQ ID NO: 208492 - DNA, 25 bp, Canis familiaris
ttggaacatgtttgctttcgttttg

SEQ ID NO: 208493 - DNA, 25 bp, Canis familiaris
ttggacagtttgcctgacttgtttt

SEQ ID NO: 208494 - DNA, 25 bp, Canis familiaris
ttgccctggtgtggtactgtgtttc

SEQ ID NO: 208495 - DNA, 25 bp, Canis familiaris
ttgctcctcctgtcgtagtgagctt

SEQ ID NO: 208496 - DNA, 25 bp, Canis familiaris
ttgctcccgtgtggttagtgttaga

SEQ ID NO: 208497 - DNA, 25 bp, Canis familiaris
ttgccccgctgtgtctggggagtag

SEQ ID NO: 208498 - DNA, 25 bp, Canis familiaris
ttgcccccgagcccaggggagaagt

SEQ ID NO: 208499 - DNA, 25 bp, Canis familiaris
ttgccacccaggtccaggatggggg

SEQ ID NO: 208500 - DNA, 25 bp, Canis familiaris
ttgccatccagagatgccagccagc

SEQ ID NO: 208501 - DNA, 25 bp, Canis familiaris
ttgcctccatgctgatgcgcaagac

SEQ ID NO: 208502 - DNA, 25 bp, Canis familiaris
ttgctctcactgtttgacaaaaatt

SEQ ID NO: 208503 - DNA, 25 bp, Canis familiaris
ttgctccaaatattatcaatgaaag

SEQ ID NO: 208504 - DNA, 25 bp, Canis familiaris
ttgctcctgcaagaatctataactg

SEQ ID NO: 208505 - DNA, 25 bp, Canis familiaris
ttgctctctaagaacttctagtcta

SEQ ID NO: 208506 - DNA, 25 bp, Canis familiaris
ttgcctcttcaaattcatctttcat

SEQ ID NO: 208507 - DNA, 25 bp, Canis familiaris
ttgcctttaacaccacctgtatgga

SEQ ID NO: 208508 - DNA, 25 bp, Canis familiaris
ttgtggattaaatacccaattgcat

SEQ ID NO: 208509 - DNA, 25 bp, Canis familiaris
ttgctggatttaaaccaccacctct

SEQ ID NO: 208510 - DNA, 25 bp, Canis familiaris
ttgtagtagctaagaggccaccccc

SEQ ID NO: 208511 - DNA, 25 bp, Canis familiaris
ttgcaagggcccaagtggccctccc

SEQ ID NO: 208512 - DNA, 25 bp, Canis familiaris
ttgagagggaacagggcagcccctg

SEQ ID NO: 208513 - DNA, 25 bp, Canis familiaris
ttgaagggatggagccgctgccctc

SEQ ID NO: 208514 - DNA, 25 bp, Canis familiaris
ttgaagggataggctgccctcctca

SEQ ID NO: 208515 - DNA, 25 bp, Canis familiaris
ttgcagaagcagtgtgtcccattcc

SEQ ID NO: 208516 - DNA, 25 bp, Canis familiaris
ttgcagaagcagtgtgtcccattcc

SEQ ID NO: 208517 - DNA, 25 bp, Canis familiaris
ttgcagaagcagtgtgtcccattcc

SEQ ID NO: 208518 - DNA, 25 bp, Canis familiaris
ttgcagaagcagtgtgtcccattcc

SEQ ID NO: 208519 - DNA, 25 bp, Canis familiaris
ttgaagtcggtggttccattctctg

SEQ ID NO: 208520 - DNA, 25 bp, Canis familiaris
ttgaagaagcgggcgtccagtgcac

SEQ ID NO: 208521 - DNA, 25 bp, Canis familiaris
ttgagtatagggtcggccacttctg

SEQ ID NO: 208522 - DNA, 25 bp, Canis familiaris
ttgagaaagcagcccggaactcttc

SEQ ID NO: 208523 - DNA, 25 bp, Canis familiaris
ttgaatcgaccacctgagaaccttc

SEQ ID NO: 208524 - DNA, 25 bp, Canis familiaris
ttgaatcgagtcaccagacccttgt

SEQ ID NO: 208525 - DNA, 25 bp, Canis familiaris
ttgaagcagaactccagcctggctt

SEQ ID NO: 208526 - DNA, 25 bp, Canis familiaris
ttgcagaagttttcctctcggtgta

SEQ ID NO: 208527 - DNA, 25 bp, Canis familiaris
ttgataaattattcccacagggcta

SEQ ID NO: 208528 - DNA, 25 bp, Canis familiaris
ttgaaaactatgccacacaccatcc

SEQ ID NO: 208529 - DNA, 25 bp, Canis familiaris
ttgccaacactaccactacagtatc

SEQ ID NO: 208530 - DNA, 25 bp, Canis familiaris
ttggcaagcttgaacctaaactctc

SEQ ID NO: 208531 - DNA, 25 bp, Canis familiaris
ttgccatgaattaactctaccacct

SEQ ID NO: 208532 - DNA, 25 bp, Canis familiaris
ttgcacagagtgactacatccccac

SEQ ID NO: 208533 - DNA, 25 bp, Canis familiaris
ttgcagcatgttgctactatcccca

SEQ ID NO: 208534 - DNA, 25 bp, Canis familiaris
ttgagttactatgttcctccatcgt

SEQ ID NO: 208535 - DNA, 25 bp, Canis familiaris
ttgagaatacctgatattctcatat

SEQ ID NO: 208536 - DNA, 25 bp, Canis familiaris
ttgcgacagcccactatattcatat

SEQ ID NO: 208537 - DNA, 25 bp, Canis familiaris
ttgcccaccacaaatattgtgccag

SEQ ID NO: 208538 - DNA, 25 bp, Canis familiaris
ttgccagtccacagtttgtgctcgt

SEQ ID NO: 208539 - DNA, 25 bp, Canis familiaris
ttgcaggtacacatttagcgccgcg

SEQ ID NO: 208540 - DNA, 25 bp, Canis familiaris
ttgagtgtacacctttgggtctgag

SEQ ID NO: 208541 - DNA, 25 bp, Canis familiaris
ttgagttcttcgactcttgcgttga

SEQ ID NO: 208542 - DNA, 25 bp, Canis familiaris
ttggctacttgctctttggacaaaa

SEQ ID NO: 208543 - DNA, 25 bp, Canis familiaris
ttgtcataccgatcttcccataaaa

SEQ ID NO: 208544 - DNA, 25 bp, Canis familiaris
ttgttatcgctcacattcacacaca

SEQ ID NO: 208545 - DNA, 25 bp, Canis familiaris
ttgaggattctccttttcagcagca

SEQ ID NO: 208546 - DNA, 25 bp, Canis familiaris
ttgataattccattttgtccccatt

SEQ ID NO: 208547 - DNA, 25 bp, Canis familiaris
ttgataactccgggttctacagctt

SEQ ID NO: 208548 - DNA, 25 bp, Canis familiaris
ttgatccccctaaggattctctgtt

SEQ ID NO: 208549 - DNA, 25 bp, Canis familiaris
ttgtccccattcattatttcttttg

SEQ ID NO: 208550 - DNA, 25 bp, Canis familiaris
ttgtccggttcaagataaactctgt

SEQ ID NO: 208551 - DNA, 25 bp, Canis familiaris
ttgtcctggtatttgctggagccct

SEQ ID NO: 208552 - DNA, 25 bp, Canis familiaris
ttgaccggatatttctggtgtcccc

SEQ ID NO: 208553 - DNA, 25 bp, Canis familiaris
ttgagccggatctttcaagtacccc

SEQ ID NO: 208554 - DNA, 25 bp, Canis familiaris
ttgatcttggactttctggctagcc

SEQ ID NO: 208555 - DNA, 25 bp, Canis familiaris
ttgtgtccgcagtgtcattgatcag

SEQ ID NO: 208556 - DNA, 25 bp, Canis familiaris
ttgttgccatggtaatcctgctcag

SEQ ID NO: 208557 - DNA, 25 bp, Canis familiaris
ttgctcgccagttaacagctctatt

SEQ ID NO: 208558 - DNA, 25 bp, Canis familiaris
ttgctggccaggccacaatgctcct

SEQ ID NO: 208559 - DNA, 25 bp, Canis familiaris
ttgctgacacgatgcaccagatcac

SEQ ID NO: 208560 - DNA, 25 bp, Canis familiaris
ttgctgacaggatccccatgcagct

SEQ ID NO: 208561 - DNA, 25 bp, Canis familiaris
ttgaagagagctgccacctgagctt

SEQ ID NO: 208562 - DNA, 25 bp, Canis familiaris
ttgaaggatgcaccggtctacctag

SEQ ID NO: 208563 - DNA, 25 bp, Canis familiaris
ttgaaggatgcccctgtgtagacca

SEQ ID NO: 208564 - DNA, 25 bp, Canis familiaris
ttgaatcctgtcccttgattaagca

SEQ ID NO: 208565 - DNA, 25 bp, Canis familiaris
ttgccagcctgtgtgcttgtgggaa

SEQ ID NO: 208566 - DNA, 25 bp, Canis familiaris
ttgccacgcgtaatgtcttgcacga

SEQ ID NO: 208567 - DNA, 25 bp, Canis familiaris
ttgccattcaggagctcttctcaga

SEQ ID NO: 208568 - DNA, 25 bp, Canis familiaris
ttgacacctcgacgatcttctggaa

SEQ ID NO: 208569 - DNA, 25 bp, Canis familiaris
ttgacctgctggcagtgtactgctg

SEQ ID NO: 208570 - DNA, 25 bp, Canis familiaris
ttgagccactggccaaaaccgttca

SEQ ID NO: 208571 - DNA, 25 bp, Canis familiaris
ttgagccaggggccaaacctttctt

SEQ ID NO: 208572 - DNA, 25 bp, Canis familiaris
ttgggaaatgggcaacttgttgcta

SEQ ID NO: 208573 - DNA, 25 bp, Canis familiaris
ttggcaaaagggcccacctgggaat

SEQ ID NO: 208574 - DNA, 25 bp, Canis familiaris
ttgccttgaagaatggccaccgggt

SEQ ID NO: 208575 - DNA, 25 bp, Canis familiaris
ttgcgtctggaggatggtcccgcag

SEQ ID NO: 208576 - DNA, 25 bp, Canis familiaris
ttgctgtgggaagtggctcccgtgt

SEQ ID NO: 208577 - DNA, 25 bp, Canis familiaris
ttgatggacaaagggctccccagct

SEQ ID NO: 208578 - DNA, 25 bp, Canis familiaris
ttgtgggaaaggactgctccccgaa

SEQ ID NO: 208579 - DNA, 25 bp, Canis familiaris
ttgcggaggaaagttgcccacctgt

SEQ ID NO: 208580 - DNA, 25 bp, Canis familiaris
ttgcggggagagctaatccaccagc

SEQ ID NO: 208581 - DNA, 25 bp, Canis familiaris
ttgttggggctgttacaccactgcc

SEQ ID NO: 208582 - DNA, 25 bp, Canis familiaris
ttgctttccctggtagagtagtggt

SEQ ID NO: 208583 - DNA, 25 bp, Canis familiaris
ttgtcgtcacctagctgatggggct

SEQ ID NO: 208584 - DNA, 25 bp, Canis familiaris
ttgggctgagccagtgcaggcaggc

SEQ ID NO: 208585 - DNA, 25 bp, Canis familiaris
ttgtggttcagatgctgcggcagcc

SEQ ID NO: 208586 - DNA, 25 bp, Canis familiaris
ttgggttcacaaggcttcgaactcg

SEQ ID NO: 208587 - DNA, 25 bp, Canis familiaris
ttgggtctcaaaggcttcgaactcg

SEQ ID NO: 208588 - DNA, 25 bp, Canis familiaris
ttgggcccaaatttggcgcataccc

SEQ ID NO: 208589 - DNA, 25 bp, Canis familiaris
ttggcgcccacagtgatgatgtcga

SEQ ID NO: 208590 - DNA, 25 bp, Canis familiaris
ttgcggtcgcgcggatcatgatgcc

SEQ ID NO: 208591 - DNA, 25 bp, Canis familiaris
ttgaagctcgctgcatgatatgtga

SEQ ID NO: 208592 - DNA, 25 bp, Canis familiaris
ttgagagtctctcccatatgtgtct

SEQ ID NO: 208593 - DNA, 25 bp, Canis familiaris
ttgtagtctctaccattctcatatg

SEQ ID NO: 208594 - DNA, 25 bp, Canis familiaris
ttgctcaggcccaagaatctcattg

SEQ ID NO: 208595 - DNA, 25 bp, Canis familiaris
ttgctcttgcctcagaagtcattct

SEQ ID NO: 208596 - DNA, 25 bp, Canis familiaris
ttgctccatttttaggtcatccatt

SEQ ID NO: 208597 - DNA, 25 bp, Canis familiaris
ttgtcaattccttagttatcttagt

SEQ ID NO: 208598 - DNA, 25 bp, Canis familiaris
ttgtcaacccaaacttttctagcca

SEQ ID NO: 208599 - DNA, 25 bp, Canis familiaris
ttgctccaagttaacttttcaagga

SEQ ID NO: 208600 - DNA, 25 bp, Canis familiaris
ttgtcgatttcaaagccttatacag

SEQ ID NO: 208601 - DNA, 25 bp, Canis familiaris
ttggtatcaccatatctcttaacag

SEQ ID NO: 208602 - DNA, 25 bp, Canis familiaris
ttggattctcaatacgtaacacagt

SEQ ID NO: 208603 - DNA, 25 bp, Canis familiaris
ttgaacctcaattggaataacctat

SEQ ID NO: 208604 - DNA, 25 bp, Canis familiaris
ttgaacgagctgatggatatgaacc

SEQ ID NO: 208605 - DNA, 25 bp, Canis familiaris
ttgaagcccagccggatgaaaccac

SEQ ID NO: 208606 - DNA, 25 bp, Canis familiaris
ttgactgccctgattatgaaaatat

SEQ ID NO: 208607 - DNA, 25 bp, Canis familiaris
ttggcagccctggttgtgatatact

SEQ ID NO: 208608 - DNA, 25 bp, Canis familiaris
ttgtcagcatccttttgctctaact

SEQ ID NO: 208609 - DNA, 25 bp, Canis familiaris
ttgaagcaccacttacatctgtacc

SEQ ID NO: 208610 - DNA, 25 bp, Canis familiaris
ttgaagacacaacacttgatctgaa

SEQ ID NO: 208611 - DNA, 25 bp, Canis familiaris
ttgaactcaccccagctggattgaa

SEQ ID NO: 208612 - DNA, 25 bp, Canis familiaris
ttgctgacccactgatgctggatgg

SEQ ID NO: 208613 - DNA, 25 bp, Canis familiaris
ttggcatcatcctcaggctggtgcc

SEQ ID NO: 208614 - DNA, 25 bp, Canis familiaris
ttgtgctgcggcttaagtgggccct

SEQ ID NO: 208615 - DNA, 25 bp, Canis familiaris
ttgctgtccagcttctagtgcatgt

SEQ ID NO: 208616 - DNA, 25 bp, Canis familiaris
ttgcattccgttgcagctgagcgat

SEQ ID NO: 208617 - DNA, 25 bp, Canis familiaris
ttgttggcgtgggagtgggctgtgc

SEQ ID NO: 208618 - DNA, 25 bp, Canis familiaris
ttgtatccaaggtgctgaatcttgg

SEQ ID NO: 208619 - DNA, 25 bp, Canis familiaris
ttgtatccaaggtgctgaatcttgg

SEQ ID NO: 208620 - DNA, 25 bp, Canis familiaris
ttgttgggaggctcatcctttgtgc

SEQ ID NO: 208621 - DNA, 25 bp, Canis familiaris
ttgcttcggggaggtccgtctggaa

SEQ ID NO: 208622 - DNA, 25 bp, Canis familiaris
ttgtacgggtgggaggttctataat

SEQ ID NO: 208623 - DNA, 25 bp, Canis familiaris
ttgctgggacgggctttttagtagt

SEQ ID NO: 208624 - DNA, 25 bp, Canis familiaris
ttgctggtaaatgcttgtgtatatc

SEQ ID NO: 208625 - DNA, 25 bp, Canis familiaris
ttgccttactatgcctgcttgagat

SEQ ID NO: 208626 - DNA, 25 bp, Canis familiaris
ttgctttcagcaatctccatttaga

SEQ ID NO: 208627 - DNA, 25 bp, Canis familiaris
ttgctgttcgtgactctgatgaccg

SEQ ID NO: 208628 - DNA, 25 bp, Canis familiaris
ttgttctcagtgccttagcatcggt

SEQ ID NO: 208629 - DNA, 25 bp, Canis familiaris
ttgacatgtcgatcttccatgcgtg

SEQ ID NO: 208630 - DNA, 25 bp, Canis familiaris
ttgaatactgatcctgctgcttggc

SEQ ID NO: 208631 - DNA, 25 bp, Canis familiaris
ttgccacaacatctgctcttggagt

SEQ ID NO: 208632 - DNA, 25 bp, Canis familiaris
ttgccatttcatcttcttggtcact

SEQ ID NO: 208633 - DNA, 25 bp, Canis familiaris
ttgctctctttatttttggccagtt

SEQ ID NO: 208634 - DNA, 25 bp, Canis familiaris
ttgcatattataatcctcctacaca

SEQ ID NO: 208635 - DNA, 25 bp, Canis familiaris
ttgctgatggatactttcttcccaa

SEQ ID NO: 208636 - DNA, 25 bp, Canis familiaris
ttgcatgtctcaatttaatccccca

SEQ ID NO: 208637 - DNA, 25 bp, Canis familiaris
ttgatttgcacgttgattcaccctc

SEQ ID NO: 208638 - DNA, 25 bp, Canis familiaris
ttgtgattgcatgtttccttcagct

SEQ ID NO: 208639 - DNA, 25 bp, Canis familiaris
ttgtttactttttcttcagctctac

SEQ ID NO: 208640 - DNA, 25 bp, Canis familiaris
ttgatagataacacgtcctcaccca

SEQ ID NO: 208641 - DNA, 25 bp, Canis familiaris
ttgagcaataacaggtctgtgatgc

SEQ ID NO: 208642 - DNA, 25 bp, Canis familiaris
ttgcagacaagcccgtgtggtgtgc

SEQ ID NO: 208643 - DNA, 25 bp, Canis familiaris
ttgcagcagcaacgatcggtgcgct

SEQ ID NO: 208644 - DNA, 25 bp, Canis familiaris
ttgcagtggcaggcattcttgcggc

SEQ ID NO: 208645 - DNA, 25 bp, Canis familiaris
ttgcatgctggacttttcaggacta

SEQ ID NO: 208646 - DNA, 25 bp, Canis familiaris
ttgctctgctgatactgtagcccta

SEQ ID NO: 208647 - DNA, 25 bp, Canis familiaris
ttgtctgataattcacaagccctga

SEQ ID NO: 208648 - DNA, 25 bp, Canis familiaris
ttgcctgtagcatatcagagtctta

SEQ ID NO: 208649 - DNA, 25 bp, Canis familiaris
ttgcctgtaacaatcagctctgcta

SEQ ID NO: 208650 - DNA, 25 bp, Canis familiaris
ttgctctgatgcacaatccttcaat

SEQ ID NO: 208651 - DNA, 25 bp, Canis familiaris
ttgccagtgcactaatctcttttgg

SEQ ID NO: 208652 - DNA, 25 bp, Canis familiaris
ttgacttgactcttccttaatggac

SEQ ID NO: 208653 - DNA, 25 bp, Canis familiaris
ttgacattgtctctccatggacata

SEQ ID NO: 208654 - DNA, 25 bp, Canis familiaris
ttgccattgtctcactctcaaaaaa

SEQ ID NO: 208655 - DNA, 25 bp, Canis familiaris
ttgagtggtctgtccttcaagagaa

SEQ ID NO: 208656 - DNA, 25 bp, Canis familiaris
ttgactggcctgaagcgcccaagaa

SEQ ID NO: 208657 - DNA, 25 bp, Canis familiaris
ttggtggccgacgaactcaacaaga

SEQ ID NO: 208658 - DNA, 25 bp, Canis familiaris
ttggtcgcgcagtataatccaaaaa

SEQ ID NO: 208659 - DNA, 25 bp, Canis familiaris
ttgaggtccacctgatgctaaagaa

SEQ ID NO: 208660 - DNA, 25 bp, Canis familiaris
ttgggatccccacgtgggacaataa

SEQ ID NO: 208661 - DNA, 25 bp, Canis familiaris
ttgaggtgtacctggaggcaacatt

SEQ ID NO: 208662 - DNA, 25 bp, Canis familiaris
ttgctgagttgaggctggcgggggt

SEQ ID NO: 208663 - DNA, 25 bp, Canis familiaris
ttgctggtgcgcagcagggggggct

SEQ ID NO: 208664 - DNA, 25 bp, Canis familiaris
ttgctggccgcaaggtggtggctga

SEQ ID NO: 208665 - DNA, 25 bp, Canis familiaris
ttgctggcgagcatgttccatggct

SEQ ID NO: 208666 - DNA, 25 bp, Canis familiaris
ttgcttgcaagtttgtctgaagctg

SEQ ID NO: 208667 - DNA, 25 bp, Canis familiaris
ttgcttcattgatctgttagtttct

SEQ ID NO: 208668 - DNA, 25 bp, Canis familiaris
ttgttttgaccatttagttttgttg

SEQ ID NO: 208669 - DNA, 25 bp, Canis familiaris
ttgttgttcccattttttgtagatt

SEQ ID NO: 208670 - DNA, 25 bp, Canis familiaris
ttgtccattcccgtaggctattgag

SEQ ID NO: 208671 - DNA, 25 bp, Canis familiaris
ttgacagttgcctccaggctttgaa

SEQ ID NO: 208672 - DNA, 25 bp, Canis familiaris
ttgattttccatccctactattgaa

SEQ ID NO: 208673 - DNA, 25 bp, Canis familiaris
ttgacgttgccacacttcatagaga

SEQ ID NO: 208674 - DNA, 25 bp, Canis familiaris
ttgtctattggcccctgtaggaagt

SEQ ID NO: 208675 - DNA, 25 bp, Canis familiaris
ttgtcttggggccttggagagggtt

SEQ ID NO: 208676 - DNA, 25 bp, Canis familiaris
ttgttgtcctggggtggatggggta

SEQ ID NO: 208677 - DNA, 25 bp, Canis familiaris
ttgctttcttggggaggctggaaaa

SEQ ID NO: 208678 - DNA, 25 bp, Canis familiaris
ttgcttgttttggctgcgtcaggta

SEQ ID NO: 208679 - DNA, 25 bp, Canis familiaris
ttgctgtctgtatcccttggagtaa

SEQ ID NO: 208680 - DNA, 25 bp, Canis familiaris
ttgtgttgtaacttctgagagcggg

SEQ ID NO: 208681 - DNA, 25 bp, Canis familiaris
ttgtgtttacctcgtagagcttgtc

SEQ ID NO: 208682 - DNA, 25 bp, Canis familiaris
ttgcgtcttcccgtgtatatgttat

SEQ ID NO: 208683 - DNA, 25 bp, Canis familiaris
ttgactttgcctgcgttgagttcat

SEQ ID NO: 208684 - DNA, 25 bp, Canis familiaris
ttgactttctcatatgttaattcca

SEQ ID NO: 208685 - DNA, 25 bp, Canis familiaris
ttgatcttccgcaaagtgtttcgcc

SEQ ID NO: 208686 - DNA, 25 bp, Canis familiaris
ttgatctctcacgagctagtgtctt

SEQ ID NO: 208687 - DNA, 25 bp, Canis familiaris
ttgccccatctagatgcagtctgct

SEQ ID NO: 208688 - DNA, 25 bp, Canis familiaris
ttgccaccatctagaccaagctgca

SEQ ID NO: 208689 - DNA, 25 bp, Canis familiaris
ttgccatctcctagcagctagtcca

SEQ ID NO: 208690 - DNA, 25 bp, Canis familiaris
ttgtcctccttgcatagtggtagtt

SEQ ID NO: 208691 - DNA, 25 bp, Canis familiaris
ttgctacctcttcctagttgaaatt

SEQ ID NO: 208692 - DNA, 25 bp, Canis familiaris
ttgtgaccctttccgtatgtattgg

SEQ ID NO: 208693 - DNA, 25 bp, Canis familiaris
ttggtcctcttttgaagttatcggg

SEQ ID NO: 208694 - DNA, 25 bp, Canis familiaris
ttggcccctatttccatctttaggg

SEQ ID NO: 208695 - DNA, 25 bp, Canis familiaris
ttggccacaatttacccttgatagg

SEQ ID NO: 208696 - DNA, 25 bp, Canis familiaris
ttgcgccaattttcacaagtgtttg

SEQ ID NO: 208697 - DNA, 25 bp, Canis familiaris
ttgcccagatgttctcagatatggt

SEQ ID NO: 208698 - DNA, 25 bp, Canis familiaris
ttgtccgcatgttgtaattgtgcaa

SEQ ID NO: 208699 - DNA, 25 bp, Canis familiaris
ttgatacttatataatcgtcaaccc

SEQ ID NO: 208700 - DNA, 25 bp, Canis familiaris
ttgatacttgtatcttggctacccc

SEQ ID NO: 208701 - DNA, 25 bp, Canis familiaris
ttgaccttgtaggggccatagacca

SEQ ID NO: 208702 - DNA, 25 bp, Canis familiaris
ttggccttgttctgctcaagatgac

SEQ ID NO: 208703 - DNA, 25 bp, Canis familiaris
ttgttcttcttccctctagataaat

SEQ ID NO: 208704 - DNA, 25 bp, Canis familiaris
ttgttgtctttcacattaaaagaaa

SEQ ID NO: 208705 - DNA, 25 bp, Canis familiaris
ttgctttcttttccttatggtaaat

SEQ ID NO: 208706 - DNA, 25 bp, Canis familiaris
ttgttccaccgtctttgttatatta

SEQ ID NO: 208707 - DNA, 25 bp, Canis familiaris
ttgttccaagctctttcttttcaaa

SEQ ID NO: 208708 - DNA, 25 bp, Canis familiaris
ttgttccaacaagttatttcactaa

SEQ ID NO: 208709 - DNA, 25 bp, Canis familiaris
ttggccgaacaagtctgattttaag

SEQ ID NO: 208710 - DNA, 25 bp, Canis familiaris
ttgaccgttcatatgcgttgttaag

SEQ ID NO: 208711 - DNA, 25 bp, Canis familiaris
ttgagctcagttagggtgttgtata

SEQ ID NO: 208712 - DNA, 25 bp, Canis familiaris
ttggctggtctacagctgtcttcta

SEQ ID NO: 208713 - DNA, 25 bp, Canis familiaris
ttggaggtcataacaatcctactga

SEQ ID NO: 208714 - DNA, 25 bp, Canis familiaris
ttggcagttaatccagtgctctttg

SEQ ID NO: 208715 - DNA, 25 bp, Canis familiaris
ttgcctttgcaatatttcttctgat

SEQ ID NO: 208716 - DNA, 25 bp, Canis familiaris
ttgttaagactgttatgtttctatt

SEQ ID NO: 208717 - DNA, 25 bp, Canis familiaris
ttgactgaaacttaatgaaactctt

SEQ ID NO: 208718 - DNA, 25 bp, Canis familiaris
ttgcacgtatccttaaaaagcctct

SEQ ID NO: 208719 - DNA, 25 bp, Canis familiaris
ttgagttgtcctaaaatacacctgg

SEQ ID NO: 208720 - DNA, 25 bp, Canis familiaris
ttgggcttcctgacagatcaaccgt

SEQ ID NO: 208721 - DNA, 25 bp, Canis familiaris
ttgggttcctataatcaagccctgc

SEQ ID NO: 208722 - DNA, 25 bp, Canis familiaris
ttgggttatgtatatcacgggatca

SEQ ID NO: 208723 - DNA, 25 bp, Canis familiaris
ttggggatttagctcagtggtagag

SEQ ID NO: 208724 - DNA, 25 bp, Canis familiaris
ttggccctgttccagtattggttat

SEQ ID NO: 208725 - DNA, 25 bp, Canis familiaris
ttgctccttgttgttatcttgtttt

SEQ ID NO: 208726 - DNA, 25 bp, Canis familiaris
ttgccctgtttttcttattttcatt

SEQ ID NO: 208727 - DNA, 25 bp, Canis familiaris
ttgcctctgcttcaggttattttct

SEQ ID NO: 208728 - DNA, 25 bp, Canis familiaris
ttgcactcagtggggaatcttttta

SEQ ID NO: 208729 - DNA, 25 bp, Canis familiaris
ttgataatgctcggaatttttttca

SEQ ID NO: 208730 - DNA, 25 bp, Canis familiaris
ttgcaaatgccttagactgtccttc

SEQ ID NO: 208731 - DNA, 25 bp, Canis familiaris
ttccaatgccatttatgttccctct

SEQ ID NO: 208732 - DNA, 25 bp, Canis familiaris
ttgcctatgcaattttgtaacctac

SEQ ID NO: 208733 - DNA, 25 bp, Canis familiaris
ttgctgcttatatttgtaaacacca

SEQ ID NO: 208734 - DNA, 25 bp, Canis familiaris
ttgctgcttcaagttcagatcagac

SEQ ID NO: 208735 - DNA, 25 bp, Canis familiaris
ttgctgcttaagttcaacgctgtat

SEQ ID NO: 208736 - DNA, 25 bp, Canis familiaris
ttgcgcttacgtggacattggccat

SEQ ID NO: 208737 - DNA, 25 bp, Canis familiaris
ttgagttcattagcacctggccatc

SEQ ID NO: 208738 - DNA, 25 bp, Canis familiaris
ttgttccatgtagccctgagcggca

SEQ ID NO: 208739 - DNA, 25 bp, Canis familiaris
ttgataccagatatgacgtaccatc

SEQ ID NO: 208740 - DNA, 25 bp, Canis familiaris
ttgcagaccattgtgagtgttcccc

SEQ ID NO: 208741 - DNA, 25 bp, Canis familiaris
ttggcagccattgaggacttcttcc

SEQ ID NO: 208742 - DNA, 25 bp, Canis familiaris
ttggactttcaacatgctccttggc

SEQ ID NO: 208743 - DNA, 25 bp, Canis familiaris
ttggccgggaagggcttgcttgggc

SEQ ID NO: 208744 - DNA, 25 bp, Canis familiaris
ttgagtttggaatggctgctgctta

SEQ ID NO: 208745 - DNA, 25 bp, Canis familiaris
ttgagtttgacattgacctgcccaa

SEQ ID NO: 208746 - DNA, 25 bp, Canis familiaris
ttggtcttggcatttcttggcacta

SEQ ID NO: 208747 - DNA, 25 bp, Canis familiaris
ttgagcctgggcattatctgaatta

SEQ ID NO: 208748 - DNA, 25 bp, Canis familiaris
ttgacaatgtactatctatctatat

SEQ ID NO: 208749 - DNA, 25 bp, Canis familiaris
ttgacaatcattttctttatcttat

SEQ ID NO: 208750 - DNA, 25 bp, Canis familiaris
ttggctatcaaatctttatcttgta

SEQ ID NO: 208751 - DNA, 25 bp, Canis familiaris
ttgccgtgaatatcttttcatctgc

SEQ ID NO: 208752 - DNA, 25 bp, Canis familiaris
ttgctttcagatatctttgctcatc

SEQ ID NO: 208753 - DNA, 25 bp, Canis familiaris
ttgtctatgccaacatctttgccac

SEQ ID NO: 208754 - DNA, 25 bp, Canis familiaris
ttgcatagagccagatctttccctc

SEQ ID NO: 208755 - DNA, 25 bp, Canis familiaris
ttgctgaacctggctatgttccttc

SEQ ID NO: 208756 - DNA, 25 bp, Canis familiaris
ttgtaagcttcgctgtgtcggagct

SEQ ID NO: 208757 - DNA, 25 bp, Canis familiaris
ttgctgagagttagggcgctcggcg

SEQ ID NO: 208758 - DNA, 25 bp, Canis familiaris
ttgggagttgcttgggcttgggccc

SEQ ID NO: 208759 - DNA, 25 bp, Canis familiaris
ttgaagaattgcttgccccgaaacc

SEQ ID NO: 208760 - DNA, 25 bp, Canis familiaris
ttgaggaatggtttccccaaggccg

SEQ ID NO: 208761 - DNA, 25 bp, Canis familiaris
ttgcggatatgttttcccacgagga

SEQ ID NO: 208762 - DNA, 25 bp, Canis familiaris
ttgccagaatgtgttgtcccaaatg

SEQ ID NO: 208763 - DNA, 25 bp, Canis familiaris
ttgccaaatatgtttctccacccat

SEQ ID NO: 208764 - DNA, 25 bp, Canis familiaris
ttgcccacaataatgtagacacctt

SEQ ID NO: 208765 - DNA, 25 bp, Canis familiaris
ttgctgcccaattctatggatccca

SEQ ID NO: 208766 - DNA, 25 bp, Canis familiaris
ttgacctcaactacatggtctacat

SEQ ID NO: 208767 - DNA, 25 bp, Canis familiaris
ttggctctaaccttggtctactatc

SEQ ID NO: 208768 - DNA, 25 bp, Canis familiaris
ttgtgtctacatccttgtcctaaat

SEQ ID NO: 208769 - DNA, 25 bp, Canis familiaris
ttgtgtctaagtttgaccccgtgta

SEQ ID NO: 208770 - DNA, 25 bp, Canis familiaris
ttggtctgaaattgtcacccggttc

SEQ ID NO: 208771 - DNA, 25 bp, Canis familiaris
ttggccaacgtagaccacgaggtcc

SEQ ID NO: 208772 - DNA, 25 bp, Canis familiaris
ttgtccaagcagaaacaccctggcg

SEQ ID NO: 208773 - DNA, 25 bp, Canis familiaris
ttgctcgcaaacacaacctctgtgg

SEQ ID NO: 208774 - DNA, 25 bp, Canis familiaris
ttgtatagatacccacccagttgaa

SEQ ID NO: 208775 - DNA, 25 bp, Canis familiaris
ttgtacaatgatgaccgccaagtga

SEQ ID NO: 208776 - DNA, 25 bp, Canis familiaris
ttggcaacaggcaacacaaccactg

SEQ ID NO: 208777 - DNA, 25 bp, Canis familiaris
ttggcaaagatgtacacccccatgc

SEQ ID NO: 208778 - DNA, 25 bp, Canis familiaris
ttggaacatgaatccccccattaga

SEQ ID NO: 208779 - DNA, 25 bp, Canis familiaris
ttgcaggaatacaactcccctttat

SEQ ID NO: 208780 - DNA, 25 bp, Canis familiaris
ttggagtagagcagccacccttaac

SEQ ID NO: 208781 - DNA, 25 bp, Canis familiaris
ttgagtggaaaccctctccttaatc

SEQ ID NO: 208782 - DNA, 25 bp, Canis familiaris
ttgagacaaaacccttgctgcttta

SEQ ID NO: 208783 - DNA, 25 bp, Canis familiaris
ttgatgactacatcgcctgctgtgt

SEQ ID NO: 208784 - DNA, 25 bp, Canis familiaris
ttgagagctcacaaggactgttgta

SEQ ID NO: 208785 - DNA, 25 bp, Canis familiaris
ttgagcctcacgaatacatccgcta

SEQ ID NO: 208786 - DNA, 25 bp, Canis familiaris
ttgcccaactgaatgacatctctcc

SEQ ID NO: 208787 - DNA, 25 bp, Canis familiaris
ttgcttcaactgcagcacttggccc

SEQ ID NO: 208788 - DNA, 25 bp, Canis familiaris
ttgctctacagatcatgctttcaca

SEQ ID NO: 208789 - DNA, 25 bp, Canis familiaris
ttggctatgcagtgtgctcttaccc

SEQ ID NO: 208790 - DNA, 25 bp, Canis familiaris
ttgacgtgctgggtgtctgtcacag

SEQ ID NO: 208791 - DNA, 25 bp, Canis familiaris
ttgtctgtgtgggtgttgctgagtg

SEQ ID NO: 208792 - DNA, 25 bp, Canis familiaris
ttgccgtgatgtctgtgtctgtgac

SEQ ID NO: 208793 - DNA, 25 bp, Canis familiaris
ttgcctgctatgacctggagtctga

SEQ ID NO: 208794 - DNA, 25 bp, Canis familiaris
ttgctgctctgattcttgtggtcgc

SEQ ID NO: 208795 - DNA, 25 bp, Canis familiaris
ttggcttcaatgctgatgaagctca

SEQ ID NO: 208796 - DNA, 25 bp, Canis familiaris
ttgagaccacattgttaggcatata

SEQ ID NO: 208797 - DNA, 25 bp, Canis familiaris
ttgacatcctattgttgacagtata

SEQ ID NO: 208798 - DNA, 25 bp, Canis familiaris
ttgactgtctatccttgcatgattt

SEQ ID NO: 208799 - DNA, 25 bp, Canis familiaris
ttgactgtcctcagtgatgtcagtt

SEQ ID NO: 208800 - DNA, 25 bp, Canis familiaris
ttgcacatgtttaacatttggctgt

SEQ ID NO: 208801 - DNA, 25 bp, Canis familiaris
ttgacgattgttaatcttggatatc

SEQ ID NO: 208802 - DNA, 25 bp, Canis familiaris
ttgacgttcgttttgtgctttctta

SEQ ID NO: 208803 - DNA, 25 bp, Canis familiaris
ttgggtttttctgagctggtctccc

SEQ ID NO: 208804 - DNA, 25 bp, Canis familiaris
ttgtggttttttgagattatcgttc

SEQ ID NO: 208805 - DNA, 25 bp, Canis familiaris
ttgttgagtttgctccagtcatctc

SEQ ID NO: 208806 - DNA, 25 bp, Canis familiaris
ttgttcattattgtactgtgctgta

SEQ ID NO: 208807 - DNA, 25 bp, Canis familiaris
ttgcctttattttacagtgcttcat

SEQ ID NO: 208808 - DNA, 25 bp, Canis familiaris
ttgcctgatctaataaacctcttta

SEQ ID NO: 208809 - DNA, 25 bp, Canis familiaris
ttgctgtgtctcaaggaactccttt

SEQ ID NO: 208810 - DNA, 25 bp, Canis familiaris
ttgttgccatcaacgaccccttcat

SEQ ID NO: 208811 - DNA, 25 bp, Canis familiaris
ttgttgccatcaatgaccccttcat

SEQ ID NO: 208812 - DNA, 25 bp, Canis familiaris
ttgttgccatagtagccttcgtcac

SEQ ID NO: 208813 - DNA, 25 bp, Canis familiaris
ttgttctctgagacccttttcagca

SEQ ID NO: 208814 - DNA, 25 bp, Canis familiaris
ttgttttgactgccctgattatgaa

SEQ ID NO: 208815 - DNA, 25 bp, Canis familiaris
ttgttgggacccctatcaattcact

SEQ ID NO: 208816 - DNA, 25 bp, Canis familiaris
ttgaaggccacctctacatatctgc

SEQ ID NO: 208817 - DNA, 25 bp, Canis familiaris
ttgtgagactgagctcctacttgcg

SEQ ID NO: 208818 - DNA, 25 bp, Canis familiaris
ttgcggcaagatgcccttgtgggtc

SEQ ID NO: 208819 - DNA, 25 bp, Canis familiaris
ttggggcagtgggcatgtatgggga

SEQ ID NO: 208820 - DNA, 25 bp, Canis familiaris
ttgagtccaggtgcatccaggttga

SEQ ID NO: 208821 - DNA, 25 bp, Canis familiaris
ttggcatccaggtccttgagcagtt

SEQ ID NO: 208822 - DNA, 25 bp, Canis familiaris
ttggcccatttcctaagctgttgga

SEQ ID NO: 208823 - DNA, 25 bp, Canis familiaris
ttgcccctactcctgaacttggggg

SEQ ID NO: 208824 - DNA, 25 bp, Canis familiaris
ttgctccttgaagggagaccggagg

SEQ ID NO: 208825 - DNA, 25 bp, Canis familiaris
ttgacctccatagagacaccgggac

SEQ ID NO: 208826 - DNA, 25 bp, Canis familiaris
ttgtcccctagggtcaccaggacag

SEQ ID NO: 208827 - DNA, 25 bp, Canis familiaris
ttgtcaccctgtacatcgacgagga

SEQ ID NO: 208828 - DNA, 25 bp, Canis familiaris
ttgttcccttagctggcgaatgctc

SEQ ID NO: 208829 - DNA, 25 bp, Canis familiaris
ttgaacccttaactggctggcatgc

SEQ ID NO: 208830 - DNA, 25 bp, Canis familiaris
ttgagcaccctgctcatgggggagc

SEQ ID NO: 208831 - DNA, 25 bp, Canis familiaris
ttggcagtcctgctcaaaggggcaa

SEQ ID NO: 208832 - DNA, 25 bp, Canis familiaris
ttgcagttcgatctaggagggtgta

SEQ ID NO: 208833 - DNA, 25 bp, Canis familiaris
ttgagtcacgtgtttggggttgtcc

SEQ ID NO: 208834 - DNA, 25 bp, Canis familiaris
ttgcagtccaaggttgtggctgttt

SEQ ID NO: 208835 - DNA, 25 bp, Canis familiaris
ttgtatcccaggtgtggcttcttca

SEQ ID NO: 208836 - DNA, 25 bp, Canis familiaris
ttggctcccaggaagtagctgactc

SEQ ID NO: 208837 - DNA, 25 bp, Canis familiaris
ttgcctgccgagggcagttcgtgcc

SEQ ID NO: 208838 - DNA, 25 bp, Canis familiaris
ttgcctccatgctgaggttggtgct

SEQ ID NO: 208839 - DNA, 25 bp, Canis familiaris
ttgctctcccacaacctgtgggcat

SEQ ID NO: 208840 - DNA, 25 bp, Canis familiaris
ttgctgtcccctacagatgtgagaa

SEQ ID NO: 208841 - DNA, 25 bp, Canis familiaris
ttgtgcattcccccagtgtaaaaat

SEQ ID NO: 208842 - DNA, 25 bp, Canis familiaris
ttgtagtccccacgaattaacagtt

SEQ ID NO: 208843 - DNA, 25 bp, Canis familiaris
ttgctaccgtccagttttacagatg

SEQ ID NO: 208844 - DNA, 25 bp, Canis familiaris
ttggcccagtcctgtttcaggagag

SEQ ID NO: 208845 - DNA, 25 bp, Canis familiaris
ttgggcacgtaatggttcagataac

SEQ ID NO: 208846 - DNA, 25 bp, Canis familiaris
ttggccaccaaatcgactcgagtca

SEQ ID NO: 208847 - DNA, 25 bp, Canis familiaris
ttgtgtttgaaatgtgagcctagta

SEQ ID NO: 208848 - DNA, 25 bp, Canis familiaris
ttgttttgacccttgacatctagct

SEQ ID NO: 208849 - DNA, 25 bp, Canis familiaris
ttgttttgagccttaacatctagct

SEQ ID NO: 208850 - DNA, 25 bp, Canis familiaris
ttgtctcttgaatctgataccatac

SEQ ID NO: 208851 - DNA, 25 bp, Canis familiaris
ttgcattgcttgagctctgatccaa

SEQ ID NO: 208852 - DNA, 25 bp, Canis familiaris
ttgcctgtctgcaacctatgcacaa

SEQ ID NO: 208853 - DNA, 25 bp, Canis familiaris
ttggctgctgctgaactgctgaaga

SEQ ID NO: 208854 - DNA, 25 bp, Canis familiaris
ttgtcagcactgagacttgagagac

SEQ ID NO: 208855 - DNA, 25 bp, Canis familiaris
ttgtcagactgagacttgagaaaca

SEQ ID NO: 208856 - DNA, 25 bp, Canis familiaris
ttgtcaagctcatttcctggtatga

SEQ ID NO: 208857 - DNA, 25 bp, Canis familiaris
ttgtcaagctcatttcctggtatga

SEQ ID NO: 208858 - DNA, 25 bp, Canis familiaris
ttgtcaagctcatttcctggtatga

SEQ ID NO: 208859 - DNA, 25 bp, Canis familiaris
ttgtaagccatggactgagtttaga

SEQ ID NO: 208860 - DNA, 25 bp, Canis familiaris
ttgaacctcagtttagttatctgca

SEQ ID NO: 208861 - DNA, 25 bp, Canis familiaris
ttgaaggtcctgtcatggtttctgt

SEQ ID NO: 208862 - DNA, 25 bp, Canis familiaris
ttgatagttcctgctgtgaggactt

SEQ ID NO: 208863 - DNA, 25 bp, Canis familiaris
ttgatatgttccgtcggttacctta

SEQ ID NO: 208864 - DNA, 25 bp, Canis familiaris
ttgattggattcatgagtggctacc

SEQ ID NO: 208865 - DNA, 25 bp, Canis familiaris
ttgtctcatttcaaagttgctacca

SEQ ID NO: 208866 - DNA, 25 bp, Canis familiaris
ttgctcaatctggaccatttgtaaa

SEQ ID NO: 208867 - DNA, 25 bp, Canis familiaris
ttgctctacccaccatattgtattc

SEQ ID NO: 208868 - DNA, 25 bp, Canis familiaris
ttgcttacaccctgtatgtttccaa

SEQ ID NO: 208869 - DNA, 25 bp, Canis familiaris
ttgattacaccttattttttacaca

SEQ ID NO: 208870 - DNA, 25 bp, Canis familiaris
ttgttccctcactatttctttagac

SEQ ID NO: 208871 - DNA, 25 bp, Canis familiaris
ttgtgtcctgtcgaacttgctagat

SEQ ID NO: 208872 - DNA, 25 bp, Canis familiaris
ttggaccatggccaacttcttagcc

SEQ ID NO: 208873 - DNA, 25 bp, Canis familiaris
ttggtccagggcctgttcctggagc

SEQ ID NO: 208874 - DNA, 25 bp, Canis familiaris
ttggtgtctggggaactccggagga

SEQ ID NO: 208875 - DNA, 25 bp, Canis familiaris
ttggctggccgggacctgacggact

SEQ ID NO: 208876 - DNA, 25 bp, Canis familiaris
ttgtgacagccgggtcctggagaga

SEQ ID NO: 208877 - DNA, 25 bp, Canis familiaris
ttggtcccgagcctctcgggaacta

SEQ ID NO: 208878 - DNA, 25 bp, Canis familiaris
ttggtttctggggcttggggacata

SEQ ID NO: 208879 - DNA, 25 bp, Canis familiaris
ttggctgttcggacccggagtgtaa

SEQ ID NO: 208880 - DNA, 25 bp, Canis familiaris
ttgtcagttcaatacctaagagtaa

SEQ ID NO: 208881 - DNA, 25 bp, Canis familiaris
ttgtcagctgtccaaacactagtaa

SEQ ID NO: 208882 - DNA, 25 bp, Canis familiaris
ttgatctttcaaacagacaattaag

SEQ ID NO: 208883 - DNA, 25 bp, Canis familiaris
ttgcacttgtgctgccaaaatctaa

SEQ ID NO: 208884 - DNA, 25 bp, Canis familiaris
ttggctctggctggccaggagccta

SEQ ID NO: 208885 - DNA, 25 bp, Canis familiaris
ttgtgctgtttggccgagaggtgag

SEQ ID NO: 208886 - DNA, 25 bp, Canis familiaris
ttgtctctttgagcattaaggcaga

SEQ ID NO: 208887 - DNA, 25 bp, Canis familiaris
ttgtctcctatgtctcttcaataaa

SEQ ID NO: 208888 - DNA, 25 bp, Canis familiaris
ttgctgtcactttgtttctattaga

SEQ ID NO: 208889 - DNA, 25 bp, Canis familiaris
ttgtgaatctttttgatcgaccaga

SEQ ID NO: 208890 - DNA, 25 bp, Canis familiaris
ttgaaatctctttgggcgtctcagt

SEQ ID NO: 208891 - DNA, 25 bp, Canis familiaris
ttgagaggctgtgatgggccctcct

SEQ ID NO: 208892 - DNA, 25 bp, Canis familiaris
ttgagatggagtgtgtggccccaac

SEQ ID NO: 208893 - DNA, 25 bp, Canis familiaris
ttgtaggagtgcgtctactgcccag

SEQ ID NO: 208894 - DNA, 25 bp, Canis familiaris
ttgaaggagtcacctggctcctctt

SEQ ID NO: 208895 - DNA, 25 bp, Canis familiaris
ttgaagaggtcaacaggccccttcc

SEQ ID NO: 208896 - DNA, 25 bp, Canis familiaris
ttgcaaagtgaatgtgtccccttcc

SEQ ID NO: 208897 - DNA, 25 bp, Canis familiaris
ttgtaatgagaatgatttctcactt

SEQ ID NO: 208898 - DNA, 25 bp, Canis familiaris
ttgtcttaagacctgttcatactgg

SEQ ID NO: 208899 - DNA, 25 bp, Canis familiaris
ttgacgttgaacctgtctcaactgg

SEQ ID NO: 208900 - DNA, 25 bp, Canis familiaris
ttgaccttgaacatggctcaggcaa

SEQ ID NO: 208901 - DNA, 25 bp, Canis familiaris
ttggttgtgaagtctcagccgtgca

SEQ ID NO: 208902 - DNA, 25 bp, Canis familiaris
ttggattcatgagtggctacctggg

SEQ ID NO: 208903 - DNA, 25 bp, Canis familiaris
ttggatgctctggatgctgctgcag

SEQ ID NO: 208904 - DNA, 25 bp, Canis familiaris
ttgtgcatcttggagtctgaggttc

SEQ ID NO: 208905 - DNA, 25 bp, Canis familiaris
ttgtcttctgcatcctgggtttata

SEQ ID NO: 208906 - DNA, 25 bp, Canis familiaris
ttgtgatttaagcagtggctggatt

SEQ ID NO: 208907 - DNA, 25 bp, Canis familiaris
ttgtctaataagcctggagatgcga

SEQ ID NO: 208908 - DNA, 25 bp, Canis familiaris
ttgatctgatgtgacctgaagtggt

SEQ ID NO: 208909 - DNA, 25 bp, Canis familiaris
ttggcatttccacctgttgtgagct

SEQ ID NO: 208910 - DNA, 25 bp, Canis familiaris
ttggtttcctccactgtgagtcaaa

SEQ ID NO: 208911 - DNA, 25 bp, Canis familiaris
ttggtctagaactcctatggtcaca

SEQ ID NO: 208912 - DNA, 25 bp, Canis familiaris
ttgggccggactacgttggaccaag

SEQ ID NO: 208913 - DNA, 25 bp, Canis familiaris
ttgggatgggtcacgttcaacgaac

SEQ ID NO: 208914 - DNA, 25 bp, Canis familiaris
ttgggatgaagcaagagctgttcta

SEQ ID NO: 208915 - DNA, 25 bp, Canis familiaris
ttgggtgagcagtaacatggtcttt

SEQ ID NO: 208916 - DNA, 25 bp, Canis familiaris
ttgcggcggaatcacaggctgatta

SEQ ID NO: 208917 - DNA, 25 bp, Canis familiaris
ttgaagtggaattacaggctgtgct

SEQ ID NO: 208918 - DNA, 25 bp, Canis familiaris
ttgacgctggatcaccaggcttctg

SEQ ID NO: 208919 - DNA, 25 bp, Canis familiaris
ttgcacctggtcagacagcgtctgc

SEQ ID NO: 208920 - DNA, 25 bp, Canis familiaris
ttggctcttgacacagggtctgggg

SEQ ID NO: 208921 - DNA, 25 bp, Canis familiaris
ttggctcttacaacagactgccttc

SEQ ID NO: 208922 - DNA, 25 bp, Canis familiaris
ttggccatctcacaagtgcttcagt

SEQ ID NO: 208923 - DNA, 25 bp, Canis familiaris
ttggctcacgagcgtgatcctcact

SEQ ID NO: 208924 - DNA, 25 bp, Canis familiaris
ttgcagtatctgtaggtatcccatt

SEQ ID NO: 208925 - DNA, 25 bp, Canis familiaris
ttgcagatattgtaatttcccttta

SEQ ID NO: 208926 - DNA, 25 bp, Canis familiaris
ttgcagatatttgaggttcccctaa

SEQ ID NO: 208927 - DNA, 25 bp, Canis familiaris
ttgggatttgactggacttcctaaa

SEQ ID NO: 208928 - DNA, 25 bp, Canis familiaris
ttgggatctcaacaggattgtcctt

SEQ ID NO: 208929 - DNA, 25 bp, Canis familiaris
ttggtttcaaaatgatgcatatttc

SEQ ID NO: 208930 - DNA, 25 bp, Canis familiaris
ttgagtattacatgggtcactgcat

SEQ ID NO: 208931 - DNA, 25 bp, Canis familiaris
ttggtttcacaattggatagctgca

SEQ ID NO: 208932 - DNA, 25 bp, Canis familiaris
ttggctattccttcatgatgcacac

SEQ ID NO: 208933 - DNA, 25 bp, Canis familiaris
ttggaaattcttacacaccattagt

SEQ ID NO: 208934 - DNA, 25 bp, Canis familiaris
ttggtacttcttaatactgtctaga

SEQ ID NO: 208935 - DNA, 25 bp, Canis familiaris
ttgcgtgcactttttataatagccc

SEQ ID NO: 208936 - DNA, 25 bp, Canis familiaris
ttgcagtcagctccacttgtaataa

SEQ ID NO: 208937 - DNA, 25 bp, Canis familiaris
ttgcatccagcttcctgtttacaat

SEQ ID NO: 208938 - DNA, 25 bp, Canis familiaris
ttgtccagatgagctgtttcctgat

SEQ ID NO: 208939 - DNA, 25 bp, Canis familiaris
ttgcttcagatgtgctttggctcct

SEQ ID NO: 208940 - DNA, 25 bp, Canis familiaris
ttgctaatgaattctttcagctctc

SEQ ID NO: 208941 - DNA, 25 bp, Canis familiaris
ttgctcacatattcatctcttgcca

SEQ ID NO: 208942 - DNA, 25 bp, Canis familiaris
ttgctacattacctcggacatgtca

SEQ ID NO: 208943 - DNA, 25 bp, Canis familiaris
ttgtcactccaggtggtccagatca

SEQ ID NO: 208944 - DNA, 25 bp, Canis familiaris
ttgtactatcgttgttgcagcagca

SEQ ID NO: 208945 - DNA, 25 bp, Canis familiaris
ttgatttcattgttgctccaagcaa

SEQ ID NO: 208946 - DNA, 25 bp, Canis familiaris
ttgactgtcttcttgcatctgtaaa

SEQ ID NO: 208947 - DNA, 25 bp, Canis familiaris
ttgcactgtcattctgcttcttgat

SEQ ID NO: 208948 - DNA, 25 bp, Canis familiaris
ttgcactgacatactggttcatgtt

SEQ ID NO: 208949 - DNA, 25 bp, Canis familiaris
ttgcactgacatacttgtcattgtt

SEQ ID NO: 208950 - DNA, 25 bp, Canis familiaris
ttgcagctgacagcttgtgcgcgtt

SEQ ID NO: 208951 - DNA, 25 bp, Canis familiaris
ttgacgcagatggcgctaggcgtgt

SEQ ID NO: 208952 - DNA, 25 bp, Canis familiaris
ttgtcatgatgagcactgggtggtg

SEQ ID NO: 208953 - DNA, 25 bp, Canis familiaris
ttgactgcatggttctgtttcagga

SEQ ID NO: 208954 - DNA, 25 bp, Canis familiaris
ttgatctcaaggctgctgttctgga

SEQ ID NO: 208955 - DNA, 25 bp, Canis familiaris
ttgatggagcggactcctcctgaga

SEQ ID NO: 208956 - DNA, 25 bp, Canis familiaris
ttgtggatgccactaactcctcaaa

SEQ ID NO: 208957 - DNA, 25 bp, Canis familiaris
ttgctcgtgtcactagtccacacaa

SEQ ID NO: 208958 - DNA, 25 bp, Canis familiaris
ttgatggtgatggtcagttaactat

SEQ ID NO: 208959 - DNA, 25 bp, Canis familiaris
ttgcacggacttattaatcatcata

SEQ ID NO: 208960 - DNA, 25 bp, Canis familiaris
ttgcactagacatttttaacatcat

SEQ ID NO: 208961 - DNA, 25 bp, Canis familiaris
ttgactcatgatccttttaatactt

SEQ ID NO: 208962 - DNA, 25 bp, Canis familiaris
ttgattgcatatccgtatctcttcc

SEQ ID NO: 208963 - DNA, 25 bp, Canis familiaris
ttgaatgatgagccttcgtgccccc

SEQ ID NO: 208964 - DNA, 25 bp, Canis familiaris
ttgagatgatggactgtggcgcccc

SEQ ID NO: 208965 - DNA, 25 bp, Canis familiaris
ttgagagctgccctatggagagccc

SEQ ID NO: 208966 - DNA, 25 bp, Canis familiaris
ttgagccattgcttggccagagccc

SEQ ID NO: 208967 - DNA, 25 bp, Canis familiaris
ttgagctctacatgtgctacagccc

SEQ ID NO: 208968 - DNA, 25 bp, Canis familiaris
ttgtcagcactctgctgtagcaccg

SEQ ID NO: 208969 - DNA, 25 bp, Canis familiaris
ttgtcagctctgagctttgcccagc

SEQ ID NO: 208970 - DNA, 25 bp, Canis familiaris
ttgtgcagttgacgcttggactcac

SEQ ID NO: 208971 - DNA, 25 bp, Canis familiaris
ttgtggatgatgatgctgtgccagt

SEQ ID NO: 208972 - DNA, 25 bp, Canis familiaris
ttgtggaggagttggcgcagttgct

SEQ ID NO: 208973 - DNA, 25 bp, Canis familiaris
ttgaaggctgtttggcttgtttaac

SEQ ID NO: 208974 - DNA, 25 bp, Canis familiaris
ttgaagagctttgagtgtttgtaca

SEQ ID NO: 208975 - DNA, 25 bp, Canis familiaris
ttgggtcattcctggtgttgctgac

SEQ ID NO: 208976 - DNA, 25 bp, Canis familiaris
ttggttttctcgagtctggtgatcc

SEQ ID NO: 208977 - DNA, 25 bp, Canis familiaris
ttggttttctttttcatgagctgat

SEQ ID NO: 208978 - DNA, 25 bp, Canis familiaris
ttgcagtgttttatactcttggaat

SEQ ID NO: 208979 - DNA, 25 bp, Canis familiaris
ttgcttgctttgaagtagctcttta

SEQ ID NO: 208980 - DNA, 25 bp, Canis familiaris
ttgcttcttctttatggatgtctta

SEQ ID NO: 208981 - DNA, 25 bp, Canis familiaris
ttgtctttctctctaatgacctatt

SEQ ID NO: 208982 - DNA, 25 bp, Canis familiaris
ttggcttttctcacaagacctgtac

SEQ ID NO: 208983 - DNA, 25 bp, Canis familiaris
ttgggtgttccggaagtctctgaaa

SEQ ID NO: 208984 - DNA, 25 bp, Canis familiaris
ttggaggtgctcggtagtggcctta

SEQ ID NO: 208985 - DNA, 25 bp, Canis familiaris
ttggcggtgacaggggtgtgcccaa

SEQ ID NO: 208986 - DNA, 25 bp, Canis familiaris
ttggctaaacatggggtgtcctctg

SEQ ID NO: 208987 - DNA, 25 bp, Canis familiaris
ttgctccaccagagtggctgtcacc

SEQ ID NO: 208988 - DNA, 25 bp, Canis familiaris
ttgctacaacaactatgcctgtccc

SEQ ID NO: 208989 - DNA, 25 bp, Canis familiaris
ttgctgtcaaaaggctgctccttcc

SEQ ID NO: 208990 - DNA, 25 bp, Canis familiaris
ttgttaaaaggtccctctgtccagg

SEQ ID NO: 208991 - DNA, 25 bp, Canis familiaris
ttgttagaaagccccctatacacag

SEQ ID NO: 208992 - DNA, 25 bp, Canis familiaris
ttgtttgaattcctcctctatttaa

SEQ ID NO: 208993 - DNA, 25 bp, Canis familiaris
ttgtgttaattatcttctaggggaa

SEQ ID NO: 208994 - DNA, 25 bp, Canis familiaris
ttgttgtacaatattgttaggggtc

SEQ ID NO: 208995 - DNA, 25 bp, Canis familiaris
ttgtttcacatacctttccgaggag

SEQ ID NO: 208996 - DNA, 25 bp, Canis familiaris
ttgtattccatttctttctctgggc

SEQ ID NO: 208997 - DNA, 25 bp, Canis familiaris
ttgctcattgccatcagcatcttct

SEQ ID NO: 208998 - DNA, 25 bp, Canis familiaris
ttgctcttcatgctgcagcagtgtt

SEQ ID NO: 208999 - DNA, 25 bp, Canis familiaris
ttggcttcagccaagcagctgatgc

SEQ ID NO: 209000 - DNA, 25 bp, Canis familiaris
ttggctctgaggggcctgagctcat

SEQ ID NO: 209001 - DNA, 25 bp, Canis familiaris
ttggctctgaatgccttgagtcgta

SEQ ID NO: 209002 - DNA, 25 bp, Canis familiaris
ttggcttgaaaactatgatgtcctc

SEQ ID NO: 209003 - DNA, 25 bp, Canis familiaris
ttggcttgtgaaactttccctcagg

SEQ ID NO: 209004 - DNA, 25 bp, Canis familiaris
ttgaatttctatatttcccatgtgg

SEQ ID NO: 209005 - DNA, 25 bp, Canis familiaris
ttgctttctccaaatatggggaggg

SEQ ID NO: 209006 - DNA, 25 bp, Canis familiaris
ttgcttgactcactaatggggacag

SEQ ID NO: 209007 - DNA, 25 bp, Canis familiaris
ttgttgcactcgtctgtggtggacc

SEQ ID NO: 209008 - DNA, 25 bp, Canis familiaris
ttgttgcattctctttgggtcttac

SEQ ID NO: 209009 - DNA, 25 bp, Canis familiaris
ttgatgtgtggtcagtcggcgtcat

SEQ ID NO: 209010 - DNA, 25 bp, Canis familiaris
ttggtgggattcctaggtggctcag

SEQ ID NO: 209011 - DNA, 25 bp, Canis familiaris
ttgctgtgggttccacaggggcccc

SEQ ID NO: 209012 - DNA, 25 bp, Canis familiaris
ttgtggtcctttagaggggcctctg

SEQ ID NO: 209013 - DNA, 25 bp, Canis familiaris
ttgtgttcccgtggagagttcaccc

SEQ ID NO: 209014 - DNA, 25 bp, Canis familiaris
ttgagttccacgaagagaattccaa

SEQ ID NO: 209015 - DNA, 25 bp, Canis familiaris
ttgagtatcccgaggcacagagcca

SEQ ID NO: 209016 - DNA, 25 bp, Canis familiaris
ttgagtttccagacaggacggccgc

SEQ ID NO: 209017 - DNA, 25 bp, Canis familiaris
ttgtgtcttctctgtggacggttgt

SEQ ID NO: 209018 - DNA, 25 bp, Canis familiaris
ttgattctcttcttgtgtgcagtgg

SEQ ID NO: 209019 - DNA, 25 bp, Canis familiaris
ttgatgtgctccacgatgtgcaggt

SEQ ID NO: 209020 - DNA, 25 bp, Canis familiaris
ttggagctctctgcgcagtatgatg

SEQ ID NO: 209021 - DNA, 25 bp, Canis familiaris
ttggatcacatcacagtttcaggag

SEQ ID NO: 209022 - DNA, 25 bp, Canis familiaris
ttggatcagatctcccattgcagga

SEQ ID NO: 209023 - DNA, 25 bp, Canis familiaris
ttgagaaacatgcccgcattgaagc

SEQ ID NO: 209024 - DNA, 25 bp, Canis familiaris
ttgagaataagccccatctcagaga

SEQ ID NO: 209025 - DNA, 25 bp, Canis familiaris
ttgagagctggacgcccagggagca

SEQ ID NO: 209026 - DNA, 25 bp, Canis familiaris
ttgacagtggtccctgcacaggaaa

SEQ ID NO: 209027 - DNA, 25 bp, Canis familiaris
ttgtgctgtggtgcctctcaggcac

SEQ ID NO: 209028 - DNA, 25 bp, Canis familiaris
ttgtgggcaggacgtctgcgctgcc

SEQ ID NO: 209029 - DNA, 25 bp, Canis familiaris
ttggcggagggagtcatgccctgct

SEQ ID NO: 209030 - DNA, 25 bp, Canis familiaris
ttgctctggtgaaactctgacctct

SEQ ID NO: 209031 - DNA, 25 bp, Canis familiaris
ttgttttagaactgttgctcatcca

SEQ ID NO: 209032 - DNA, 25 bp, Canis familiaris
ttgttcctaatcgtgtgttcctaat

SEQ ID NO: 209033 - DNA, 25 bp, Canis familiaris
ttgtttctcaatgtggatgtcctcg

SEQ ID NO: 209034 - DNA, 25 bp, Canis familiaris
ttgttccagcgatggcatgttcctc

SEQ ID NO: 209035 - DNA, 25 bp, Canis familiaris
ttgtgctcaatgcaactgccttgcc

SEQ ID NO: 209036 - DNA, 25 bp, Canis familiaris
ttgtgcaaataaacgctcactccaa

SEQ ID NO: 209037 - DNA, 25 bp, Canis familiaris
ttggaaattgcatcctcagctccag

SEQ ID NO: 209038 - DNA, 25 bp, Canis familiaris
ttggcaaactgctatgcccagccac

SEQ ID NO: 209039 - DNA, 25 bp, Canis familiaris
ttgaggaacgtgtcaccatgcaccg

SEQ ID NO: 209040 - DNA, 25 bp, Canis familiaris
ttgagagtagagcctccactgcagc

SEQ ID NO: 209041 - DNA, 25 bp, Canis familiaris
ttgagggaagcagcagcttgcagca

SEQ ID NO: 209042 - DNA, 25 bp, Canis familiaris
ttgtgaggaacaactgcccagacct

SEQ ID NO: 209043 - DNA, 25 bp, Canis familiaris
ttgtgattgcaagatgccctcagca

SEQ ID NO: 209044 - DNA, 25 bp, Canis familiaris
ttggcattctgggatccgctgagaa

SEQ ID NO: 209045 - DNA, 25 bp, Canis familiaris
ttgtcatttgtaatgccatggatgg

SEQ ID NO: 209046 - DNA, 25 bp, Canis familiaris
ttgaatttgtttgagctgctgagat

SEQ ID NO: 209047 - DNA, 25 bp, Canis familiaris
ttgactctactttacacatggagaa

SEQ ID NO: 209048 - DNA, 25 bp, Canis familiaris
ttgacctacatgttcacctgtggaa

SEQ ID NO: 209049 - DNA, 25 bp, Canis familiaris
ttgaacagactcttctccaggtgta

SEQ ID NO: 209050 - DNA, 25 bp, Canis familiaris
ttgacacagacctacaccaggcaga

SEQ ID NO: 209051 - DNA, 25 bp, Canis familiaris
ttgacaccacacagcccaggtgatc

SEQ ID NO: 209052 - DNA, 25 bp, Canis familiaris
ttgtccggcagctcgaaggtgatct

SEQ ID NO: 209053 - DNA, 25 bp, Canis familiaris
ttgtacgcggcttgccagaggtggc

SEQ ID NO: 209054 - DNA, 25 bp, Canis familiaris
ttgtaatgctggtcccaagtggccg

SEQ ID NO: 209055 - DNA, 25 bp, Canis familiaris
ttgtcattcgctgccagcaattagc

SEQ ID NO: 209056 - DNA, 25 bp, Canis familiaris
ttgtcttcctgccacagactgataa

SEQ ID NO: 209057 - DNA, 25 bp, Canis familiaris
ttgatcttcctgtaccactgttaag

SEQ ID NO: 209058 - DNA, 25 bp, Canis familiaris
ttgatttcacttacccttctagggt

SEQ ID NO: 209059 - DNA, 25 bp, Canis familiaris
ttgggtccttcaggtttctggaggc

SEQ ID NO: 209060 - DNA, 25 bp, Canis familiaris
ttgtgctatccctgtaattctgtga

SEQ ID NO: 209061 - DNA, 25 bp, Canis familiaris
ttgtgctatccctgtaattctgtga

SEQ ID NO: 209062 - DNA, 25 bp, Canis familiaris
ttgtcatgatgctgtttaacactgt

SEQ ID NO: 209063 - DNA, 25 bp, Canis familiaris
ttgtgcttgctggcttgtgaatccg

SEQ ID NO: 209064 - DNA, 25 bp, Canis familiaris
ttgtctgatgctggctcttgatacc

SEQ ID NO: 209065 - DNA, 25 bp, Canis familiaris
ttgctccagtgccttacatgactta

SEQ ID NO: 209066 - DNA, 25 bp, Canis familiaris
ttgacacagtcacaactgccatctc

SEQ ID NO: 209067 - DNA, 25 bp, Canis familiaris
ttgagacattcaccataacctaata

SEQ ID NO: 209068 - DNA, 25 bp, Canis familiaris
ttgaactcagcacgacagacccaaa

SEQ ID NO: 209069 - DNA, 25 bp, Canis familiaris
ttgacccagacatctcacttgaaga

SEQ ID NO: 209070 - DNA, 25 bp, Canis familiaris
ttgacccgaatcacactttagcacc

SEQ ID NO: 209071 - DNA, 25 bp, Canis familiaris
ttgagcccaagattcacctttacac

SEQ ID NO: 209072 - DNA, 25 bp, Canis familiaris
ttggcctcaaataacttgcttcgac

SEQ ID NO: 209073 - DNA, 25 bp, Canis familiaris
ttggagctctactttcttgctttac

SEQ ID NO: 209074 - DNA, 25 bp, Canis familiaris
ttgaagcttgactgtcctgtgttcc

SEQ ID NO: 209075 - DNA, 25 bp, Canis familiaris
ttgatcctatggttggcctttggcc

SEQ ID NO: 209076 - DNA, 25 bp, Canis familiaris
ttgatagagaggtgtgcccctgcgt

SEQ ID NO: 209077 - DNA, 25 bp, Canis familiaris
ttgttacaggaagtcccttgccatc

SEQ ID NO: 209078 - DNA, 25 bp, Canis familiaris
ttgcttaatagccattccttaccac

SEQ ID NO: 209079 - DNA, 25 bp, Canis familiaris
ttggatatctatacactccttccca

SEQ ID NO: 209080 - DNA, 25 bp, Canis familiaris
ttggttctatgtttggcctccaact

SEQ ID NO: 209081 - DNA, 25 bp, Canis familiaris
ttggttctaggaagctgcccacaca

SEQ ID NO: 209082 - DNA, 25 bp, Canis familiaris
ttgagttgtttgaaccctgccaagg

SEQ ID NO: 209083 - DNA, 25 bp, Canis familiaris
ttgaggtgttagatccatcccaacg

SEQ ID NO: 209084 - DNA, 25 bp, Canis familiaris
ttgagtgtttaagatctgccccagc

SEQ ID NO: 209085 - DNA, 25 bp, Canis familiaris
ttgaggccctaccaaatgagcccac

SEQ ID NO: 209086 - DNA, 25 bp, Canis familiaris
ttgggtccaagccaatattcttccc

SEQ ID NO: 209087 - DNA, 25 bp, Canis familiaris
ttggtgtccacacaatcctgtcacc

SEQ ID NO: 209088 - DNA, 25 bp, Canis familiaris
ttgagagtacctcaaactctccctc

SEQ ID NO: 209089 - DNA, 25 bp, Canis familiaris
ttgaagccaacacagaacttgctgc

SEQ ID NO: 209090 - DNA, 25 bp, Canis familiaris
ttgacccccagatgagtgctaggcc

SEQ ID NO: 209091 - DNA, 25 bp, Canis familiaris
ttgacccccagatgagtgctaggcc

SEQ ID NO: 209092 - DNA, 25 bp, Canis familiaris
ttgtccccacgaagttgcataacca

SEQ ID NO: 209093 - DNA, 25 bp, Canis familiaris
ttgtcgagccctaagattcaccagc

SEQ ID NO: 209094 - DNA, 25 bp, Canis familiaris
ttgtctactctccaagttaccagaa

SEQ ID NO: 209095 - DNA, 25 bp, Canis familiaris
ttgtctatctctttatgttgtccgc

SEQ ID NO: 209096 - DNA, 25 bp, Canis familiaris
ttgtctacgtaattgtgttccactt

SEQ ID NO: 209097 - DNA, 25 bp, Canis familiaris
ttgtcatagctgtcaaatgttataa

SEQ ID NO: 209098 - DNA, 25 bp, Canis familiaris
ttgtcatcgctgtttgtgttctact

SEQ ID NO: 209099 - DNA, 25 bp, Canis familiaris
ttgacctgcatgttttttcttcacc

SEQ ID NO: 209100 - DNA, 25 bp, Canis familiaris
ttgagccatttacttttcctcactc

SEQ ID NO: 209101 - DNA, 25 bp, Canis familiaris
ttgagaatctttctcttgactatcc

SEQ ID NO: 209102 - DNA, 25 bp, Canis familiaris
ttgagaagccacagtctctcctatc

SEQ ID NO: 209103 - DNA, 25 bp, Canis familiaris
ttggaggcacagagtcacttccgca

SEQ ID NO: 209104 - DNA, 25 bp, Canis familiaris
ttggcaggcctaactgcatcttgcc

SEQ ID NO: 209105 - DNA, 25 bp, Canis familiaris
ttgtgcagaaatacatcatacttgt

SEQ ID NO: 209106 - DNA, 25 bp, Canis familiaris
ttggtgaaatcaaacacttgtttta

SEQ ID NO: 209107 - DNA, 25 bp, Canis familiaris
ttgggaactcagcaccatgaagctt

SEQ ID NO: 209108 - DNA, 25 bp, Canis familiaris
ttgaggaactcacagctcgtcaggc

SEQ ID NO: 209109 - DNA, 25 bp, Canis familiaris
ttgagaagtctcccagtaagctgga

SEQ ID NO: 209110 - DNA, 25 bp, Canis familiaris
ttggaatgtccaacagttatgccga

SEQ ID NO: 209111 - DNA, 25 bp, Canis familiaris
ttggagatgttaaagttcgagtgcc

SEQ ID NO: 209112 - DNA, 25 bp, Canis familiaris
ttgagagaggtacattgggaggatc

SEQ ID NO: 209113 - DNA, 25 bp, Canis familiaris
ttgtgtcaggaaaaatgtgggtatc

SEQ ID NO: 209114 - DNA, 25 bp, Canis familiaris
ttgtgcaacagaaaccagtgggcta

SEQ ID NO: 209115 - DNA, 25 bp, Canis familiaris
ttgtgctacgaatctcatgaaagta

SEQ ID NO: 209116 - DNA, 25 bp, Canis familiaris
ttgactggcgtctcttgaatatttt

SEQ ID NO: 209117 - DNA, 25 bp, Canis familiaris
ttgcagggttctgcttgtttttctg

SEQ ID NO: 209118 - DNA, 25 bp, Canis familiaris
ttggggatcatagcttgttttattt

SEQ ID NO: 209119 - DNA, 25 bp, Canis familiaris
ttgggcgtctgcactgcagttgttc

SEQ ID NO: 209120 - DNA, 25 bp, Canis familiaris
ttggatgctaccactggtgctgtcc

SEQ ID NO: 209121 - DNA, 25 bp, Canis familiaris
ttgagagtgactacagcggtgcttg

SEQ ID NO: 209122 - DNA, 25 bp, Canis familiaris
ttgaggaatgctcccagggcatggg

SEQ ID NO: 209123 - DNA, 25 bp, Canis familiaris
ttgaagaccagcaccggctgggcct

SEQ ID NO: 209124 - DNA, 25 bp, Canis familiaris
ttgaagagcctgggcctggtggacc

SEQ ID NO: 209125 - DNA, 25 bp, Canis familiaris
ttgaagagatcgggccacgttgtcc

SEQ ID NO: 209126 - DNA, 25 bp, Canis familiaris
ttgaatatatcctgccactcttttc

SEQ ID NO: 209127 - DNA, 25 bp, Canis familiaris
ttgaaatatgcttggcctctgctca

SEQ ID NO: 209128 - DNA, 25 bp, Canis familiaris
ttgacagtcactgggctccatgtga

SEQ ID NO: 209129 - DNA, 25 bp, Canis familiaris
ttgagagtgcctgtgtcttgtgcag

SEQ ID NO: 209130 - DNA, 25 bp, Canis familiaris
ttgaggatcctgggctgtctggaac

SEQ ID NO: 209131 - DNA, 25 bp, Canis familiaris
ttggcaaccttcggttggttcctgg

SEQ ID NO: 209132 - DNA, 25 bp, Canis familiaris
ttgtctgacctggcggtttgttttg

SEQ ID NO: 209133 - DNA, 25 bp, Canis familiaris
ttgtctacctggggtctagctgttt

SEQ ID NO: 209134 - DNA, 25 bp, Canis familiaris
ttgtctccctgtgggtttggaacaa

SEQ ID NO: 209135 - DNA, 25 bp, Canis familiaris
ttgtcttccgtgtgtatctcagtaa

SEQ ID NO: 209136 - DNA, 25 bp, Canis familiaris
ttgtccccaggaaatttgcagtgaa

SEQ ID NO: 209137 - DNA, 25 bp, Canis familiaris
ttgtctcaccggcacttagaggaaa

SEQ ID NO: 209138 - DNA, 25 bp, Canis familiaris
ttgatatctcggatacaatagaggc

SEQ ID NO: 209139 - DNA, 25 bp, Canis familiaris
ttgaatccagctctccaagaggtga

SEQ ID NO: 209140 - DNA, 25 bp, Canis familiaris
ttgataccagatctcacatagcccg

SEQ ID NO: 209141 - DNA, 25 bp, Canis familiaris
ttgctaccaatgctctcaaacatcc

SEQ ID NO: 209142 - DNA, 25 bp, Canis familiaris
ttgtcagtcaatgttcactacccca

SEQ ID NO: 209143 - DNA, 25 bp, Canis familiaris
ttgtactaatcgcattctgacttcc

SEQ ID NO: 209144 - DNA, 25 bp, Canis familiaris
ttgtatcaaataactttacttgcct

SEQ ID NO: 209145 - DNA, 25 bp, Canis familiaris
ttgtctaataaacctcttgtatcct

SEQ ID NO: 209146 - DNA, 25 bp, Canis familiaris
ttgtaaatacaccaccttactcctt

SEQ ID NO: 209147 - DNA, 25 bp, Canis familiaris
ttggagaaataccactgtccctcct

SEQ ID NO: 209148 - DNA, 25 bp, Canis familiaris
ttggaggacatccaacgtctccatc

SEQ ID NO: 209149 - DNA, 25 bp, Canis familiaris
ttgaagaaaccacgcgtcatctcac

SEQ ID NO: 209150 - DNA, 25 bp, Canis familiaris
ttgaaattaatcccagacatcccct

SEQ ID NO: 209151 - DNA, 25 bp, Canis familiaris
ttgaaagtcacgcagagatcacccc

SEQ ID NO: 209152 - DNA, 25 bp, Canis familiaris
ttgaaaggacagcgctgacctggcc

SEQ ID NO: 209153 - DNA, 25 bp, Canis familiaris
ttgtaaggtggatggcacttgccca

SEQ ID NO: 209154 - DNA, 25 bp, Canis familiaris
ttgcatgacaggagagaccaccccc

SEQ ID NO: 209155 - DNA, 25 bp, Canis familiaris
ttgacaatggggttccacccctcat

SEQ ID NO: 209156 - DNA, 25 bp, Canis familiaris
ttgcaaataggtctctcttctccat

SEQ ID NO: 209157 - DNA, 25 bp, Canis familiaris
ttgtaaagggcggctgctgttcctg

SEQ ID NO: 209158 - DNA, 25 bp, Canis familiaris
ttgaggaagtggctttgcctccggt

SEQ ID NO: 209159 - DNA, 25 bp, Canis familiaris
ttgcaggaagctgccttttcgcgtg

SEQ ID NO: 209160 - DNA, 25 bp, Canis familiaris
ttgggaaggtctaatataagcagag

SEQ ID NO: 209161 - DNA, 25 bp, Canis familiaris
ttgactgcacaggtaatacaacacg

SEQ ID NO: 209162 - DNA, 25 bp, Canis familiaris
ttgtggccagcactgttagcacacc

SEQ ID NO: 209163 - DNA, 25 bp, Canis familiaris
ttgaggcagccatcctaacacagct

SEQ ID NO: 209164 - DNA, 25 bp, Canis familiaris
ttgaagaccataatccaccacagct

SEQ ID NO: 209165 - DNA, 25 bp, Canis familiaris
ttgaaacgctgcattcgcacagcag

SEQ ID NO: 209166 - DNA, 25 bp, Canis familiaris
ttgagaagcgccttgacagactgga

SEQ ID NO: 209167 - DNA, 25 bp, Canis familiaris
ttgacacagcactattcatcctctg

SEQ ID NO: 209168 - DNA, 25 bp, Canis familiaris
ttggactgcactgacacaatctgtt

SEQ ID NO: 209169 - DNA, 25 bp, Canis familiaris
ttgagatctggtgacccatctccac

SEQ ID NO: 209170 - DNA, 25 bp, Canis familiaris
ttgaactgtgcagatcatcctcgcc

SEQ ID NO: 209171 - DNA, 25 bp, Canis familiaris
ttgacacttagccgctgtctcgccg

SEQ ID NO: 209172 - DNA, 25 bp, Canis familiaris
ttggcacatattcctgcttctacta

SEQ ID NO: 209173 - DNA, 25 bp, Canis familiaris
ttgagagcttgaaactttatctaag

SEQ ID NO: 209174 - DNA, 25 bp, Canis familiaris
ttgagagacttccagttttccataa

SEQ ID NO: 209175 - DNA, 25 bp, Canis familiaris
ttgggacttatggattgttttggaa

SEQ ID NO: 209176 - DNA, 25 bp, Canis familiaris
ttgaggtgctttgtgctttcttgtg

SEQ ID NO: 209177 - DNA, 25 bp, Canis familiaris
ttggaatggcttgggccttgctggg

SEQ ID NO: 209178 - DNA, 25 bp, Canis familiaris
ttgtattggcacatagctcttctgt

SEQ ID NO: 209179 - DNA, 25 bp, Canis familiaris
ttgaatgtggccatcactcttctgt

SEQ ID NO: 209180 - DNA, 25 bp, Canis familiaris
ttgacatgggccacttgttgctatg

SEQ ID NO: 209181 - DNA, 25 bp, Canis familiaris
ttgttgaggcagaccttgcactctt

SEQ ID NO: 209182 - DNA, 25 bp, Canis familiaris
ttgtgtgaagctgccttccctaaga

SEQ ID NO: 209183 - DNA, 25 bp, Canis familiaris
ttggtgtagaccattcttgcgagga

SEQ ID NO: 209184 - DNA, 25 bp, Canis familiaris
ttggcaattactattcatctgagag

SEQ ID NO: 209185 - DNA, 25 bp, Canis familiaris
ttgtgcaaaacgagcttctgggagt

SEQ ID NO: 209186 - DNA, 25 bp, Canis familiaris
ttgttaaatcttgttctgtccgtct

SEQ ID NO: 209187 - DNA, 25 bp, Canis familiaris
ttgttaaatcttgttctgtccgtct

SEQ ID NO: 209188 - DNA, 25 bp, Canis familiaris
ttgttaaatcttgttctgtccgtct

SEQ ID NO: 209189 - DNA, 25 bp, Canis familiaris
ttgtcaaaatctctgtttggcccct

SEQ ID NO: 209190 - DNA, 25 bp, Canis familiaris
ttggacctatctcttattgttacct

SEQ ID NO: 209191 - DNA, 25 bp, Canis familiaris
ttgcacctttcattgttttttaact

SEQ ID NO: 209192 - DNA, 25 bp, Canis familiaris
ttgcacctgttcaagttgtctacta

SEQ ID NO: 209193 - DNA, 25 bp, Canis familiaris
ttgaagcgtctgaagatactctacc

SEQ ID NO: 209194 - DNA, 25 bp, Canis familiaris
ttgaggagctcaatcgaactctgaa

SEQ ID NO: 209195 - DNA, 25 bp, Canis familiaris
ttgaggtgccattcgcacctctggc

SEQ ID NO: 209196 - DNA, 25 bp, Canis familiaris
ttgaggtctgcttctacctttgcag

SEQ ID NO: 209197 - DNA, 25 bp, Canis familiaris
ttgcaggtggcttgtaccactccaa

SEQ ID NO: 209198 - DNA, 25 bp, Canis familiaris
ttgggggctagtagctgatctgccg

SEQ ID NO: 209199 - DNA, 25 bp, Canis familiaris
ttgggaggtgatacaagattgcttt

SEQ ID NO: 209200 - DNA, 25 bp, Canis familiaris
ttgtggggcgatgaatgttattgat

SEQ ID NO: 209201 - DNA, 25 bp, Canis familiaris
ttgggggtgtgaactcttcatctca

SEQ ID NO: 209202 - DNA, 25 bp, Canis familiaris
ttgtaggagtctgctcttcttggca

SEQ ID NO: 209203 - DNA, 25 bp, Canis familiaris
ttgtagcgagtctgttttctgaggc

SEQ ID NO: 209204 - DNA, 25 bp, Canis familiaris
ttgaacgcgtgctgttttattgcca

SEQ ID NO: 209205 - DNA, 25 bp, Canis familiaris
ttggctggatagtgttttaattgca

SEQ ID NO: 209206 - DNA, 25 bp, Canis familiaris
ttggccctatgtgtcttgtaaatca

SEQ ID NO: 209207 - DNA, 25 bp, Canis familiaris
ttgacccttgacatctagctcaacc

SEQ ID NO: 209208 - DNA, 25 bp, Canis familiaris
ttgactccctgaaggtagctcattt

SEQ ID NO: 209209 - DNA, 25 bp, Canis familiaris
ttgacatccctgaaatctgaccatt

SEQ ID NO: 209210 - DNA, 25 bp, Canis familiaris
ttgagtaccagagatcatgacctga

SEQ ID NO: 209211 - DNA, 25 bp, Canis familiaris
ttgagcaacctatgacatcacctga

SEQ ID NO: 209212 - DNA, 25 bp, Canis familiaris
ttgtgaacactatgactgacgccct

SEQ ID NO: 209213 - DNA, 25 bp, Canis familiaris
ttgtttgcactaacctgagagccct

SEQ ID NO: 209214 - DNA, 25 bp, Canis familiaris
ttgttccacataaagcagcggccgt

SEQ ID NO: 209215 - DNA, 25 bp, Canis familiaris
ttgtgcttcaattaatggggtccta

SEQ ID NO: 209216 - DNA, 25 bp, Canis familiaris
ttgtgcttcgagggtgaggcccact

SEQ ID NO: 209217 - DNA, 25 bp, Canis familiaris
ttggtgttggcaagccaagcccctt

SEQ ID NO: 209218 - DNA, 25 bp, Canis familiaris
ttgcagaggggcagcaacaccccct

SEQ ID NO: 209219 - DNA, 25 bp, Canis familiaris
ttgtggggaggggacagccccctca

SEQ ID NO: 209220 - DNA, 25 bp, Canis familiaris
ttggggtactggcagagccgtggct

SEQ ID NO: 209221 - DNA, 25 bp, Canis familiaris
ttggtggctacatgctggggagtgc

SEQ ID NO: 209222 - DNA, 25 bp, Canis familiaris
ttgagcgcgcaatggtcggtaggcg

SEQ ID NO: 209223 - DNA, 25 bp, Canis familiaris
ttgagctagccatcgtgggctcgga

SEQ ID NO: 209224 - DNA, 25 bp, Canis familiaris
ttggctacagcaaccgggtggtggg

SEQ ID NO: 209225 - DNA, 25 bp, Canis familiaris
ttgggcacaaactggcctgagtcgc

SEQ ID NO: 209226 - DNA, 25 bp, Canis familiaris
ttgggccaaaaggctgttgagtctt

SEQ ID NO: 209227 - DNA, 25 bp, Canis familiaris
ttgggccatcaagattttgcagtct

SEQ ID NO: 209228 - DNA, 25 bp, Canis familiaris
ttgggactgctgtgttttgctgttt

SEQ ID NO: 209229 - DNA, 25 bp, Canis familiaris
ttgggaccggtgttgtttgttccag

SEQ ID NO: 209230 - DNA, 25 bp, Canis familiaris
ttgtggcaccgtctttaatttcttg

SEQ ID NO: 209231 - DNA, 25 bp, Canis familiaris
ttggtactggtttttacttctctga

SEQ ID NO: 209232 - DNA, 25 bp, Canis familiaris
ttgtaactggcatttattatttcat

SEQ ID NO: 209233 - DNA, 25 bp, Canis familiaris
ttgtgtatctgggaaagtctttatt

SEQ ID NO: 209234 - DNA, 25 bp, Canis familiaris
ttgtgccgtgtttacagttttttgt

SEQ ID NO: 209235 - DNA, 25 bp, Canis familiaris
ttgtcccgtctgtgatttatatttt

SEQ ID NO: 209236 - DNA, 25 bp, Canis familiaris
ttgttccttcagtgccttttattat

SEQ ID NO: 209237 - DNA, 25 bp, Canis familiaris
ttggccctgttgtgctgttttataa

SEQ ID NO: 209238 - DNA, 25 bp, Canis familiaris
ttgtcctgctgtcgttttttagatg

SEQ ID NO: 209239 - DNA, 25 bp, Canis familiaris
ttgtgtcgagtcagatccttaatat

SEQ ID NO: 209240 - DNA, 25 bp, Canis familiaris
ttgagtgtagttcacgctgaaagat

SEQ ID NO: 209241 - DNA, 25 bp, Canis familiaris
ttgagatcagtgctccaagataata

SEQ ID NO: 209242 - DNA, 25 bp, Canis familiaris
ttgcagacgctcttccgagtgtaaa

SEQ ID NO: 209243 - DNA, 25 bp, Canis familiaris
ttgcagagcccagtgctgggtttcc

SEQ ID NO: 209244 - DNA, 25 bp, Canis familiaris
ttgaatgctctgttgtgggtggtac

SEQ ID NO: 209245 - DNA, 25 bp, Canis familiaris
ttgatggctctgtggaggtagaaga

SEQ ID NO: 209246 - DNA, 25 bp, Canis familiaris
ttggagcactccttgagctgttgaa

SEQ ID NO: 209247 - DNA, 25 bp, Canis familiaris
ttgtgagaccacttggtgtctgcct

SEQ ID NO: 209248 - DNA, 25 bp, Canis familiaris
ttgtgagttcagctgagtcggcctc

SEQ ID NO: 209249 - DNA, 25 bp, Canis familiaris
ttggaaggcagccaagctcggtcac

SEQ ID NO: 209250 - DNA, 25 bp, Canis familiaris
ttggacgtcagcggtgtctgttcca

SEQ ID NO: 209251 - DNA, 25 bp, Canis familiaris
ttgaacatgtcggggatcgctctca

SEQ ID NO: 209252 - DNA, 25 bp, Canis familiaris
ttgtacaggccaggagttgcctcct

SEQ ID NO: 209253 - DNA, 25 bp, Canis familiaris
ttgtgatcagcagcatccagggcaa

SEQ ID NO: 209254 - DNA, 25 bp, Canis familiaris
ttgattacacgctcaggtcatgatc

SEQ ID NO: 209255 - DNA, 25 bp, Canis familiaris
ttgattgaccgtccagagtgagccc

SEQ ID NO: 209256 - DNA, 25 bp, Canis familiaris
ttgtagcctcttccaaggcagcttc

SEQ ID NO: 209257 - DNA, 25 bp, Canis familiaris
ttgtcatgcccaaggggtcgttgcg

SEQ ID NO: 209258 - DNA, 25 bp, Canis familiaris
ttgtcacctaagggcttctgatttc

SEQ ID NO: 209259 - DNA, 25 bp, Canis familiaris
ttgtccggaagaccttcgagtccac

SEQ ID NO: 209260 - DNA, 25 bp, Canis familiaris
ttgtccggagggccagttacttaat

SEQ ID NO: 209261 - DNA, 25 bp, Canis familiaris
ttgtccggggagatggtgttgtact

SEQ ID NO: 209262 - DNA, 25 bp, Canis familiaris
ttgtagctggggctttggtgttcct

SEQ ID NO: 209263 - DNA, 25 bp, Canis familiaris
ttgggctgaggtctgtcttggtgcc

SEQ ID NO: 209264 - DNA, 25 bp, Canis familiaris
ttgtgctgctgactgttttgcttga

SEQ ID NO: 209265 - DNA, 25 bp, Canis familiaris
ttgtcagctgggatctgctttgctt

SEQ ID NO: 209266 - DNA, 25 bp, Canis familiaris
ttgtgttgcagcagtctctttgttc

SEQ ID NO: 209267 - DNA, 25 bp, Canis familiaris
ttgttctagcagttcttcattgtta

SEQ ID NO: 209268 - DNA, 25 bp, Canis familiaris
ttgaaaatcatctgcttcatgtgtt

SEQ ID NO: 209269 - DNA, 25 bp, Canis familiaris
ttgtcacatattttgcttcaggctt

SEQ ID NO: 209270 - DNA, 25 bp, Canis familiaris
ttgtcctgtcattctgttcaggcca

SEQ ID NO: 209271 - DNA, 25 bp, Canis familiaris
ttgtcaattttcttttggccatttt

SEQ ID NO: 209272 - DNA, 25 bp, Canis familiaris
ttgtagattttcttcagtcccattg

SEQ ID NO: 209273 - DNA, 25 bp, Canis familiaris
ttgtattttttatgttacattgtta

SEQ ID NO: 209274 - DNA, 25 bp, Canis familiaris
ttgttttgtttagattccatatata

SEQ ID NO: 209275 - DNA, 25 bp, Canis familiaris
ttgtttcagtgtttaatctccccta

SEQ ID NO: 209276 - DNA, 25 bp, Canis familiaris
ttgtcatttttttaactccctctga

SEQ ID NO: 209277 - DNA, 25 bp, Canis familiaris
ttgttttgttttaatctactcctga

SEQ ID NO: 209278 - DNA, 25 bp, Canis familiaris
ttgatatgttgtagtctctcacttt

SEQ ID NO: 209279 - DNA, 25 bp, Canis familiaris
ttgatggaatcttgtctcacattta

SEQ ID NO: 209280 - DNA, 25 bp, Canis familiaris
ttgatggacacttgggtgcttctat

SEQ ID NO: 209281 - DNA, 25 bp, Canis familiaris
ttgtggcaagctggctggtgctcag

SEQ ID NO: 209282 - DNA, 25 bp, Canis familiaris
ttgtgtgcacaccgttgtgctatgg

SEQ ID NO: 209283 - DNA, 25 bp, Canis familiaris
ttgtgctgggtccttgtgtgatgga

SEQ ID NO: 209284 - DNA, 25 bp, Canis familiaris
ttggctggtggactgtgtggttgat

SEQ ID NO: 209285 - DNA, 25 bp, Canis familiaris
ttgtgttgctgactcaggggctctt

SEQ ID NO: 209286 - DNA, 25 bp, Canis familiaris
ttggttgtgacaatcgggcctgtct

SEQ ID NO: 209287 - DNA, 25 bp, Canis familiaris
ttgtagtcagaagtctctggcccct

SEQ ID NO: 209288 - DNA, 25 bp, Canis familiaris
ttgtttcagcaagccttacctacaa

SEQ ID NO: 209289 - DNA, 25 bp, Canis familiaris
ttgtataggcaaaccatttccttaa

SEQ ID NO: 209290 - DNA, 25 bp, Canis familiaris
ttgtataggccaaccatattccctt

SEQ ID NO: 209291 - DNA, 25 bp, Canis familiaris
ttgtatttgctctgcctataccaca

SEQ ID NO: 209292 - DNA, 25 bp, Canis familiaris
ttggaatgtgctgggcccaacgaca

SEQ ID NO: 209293 - DNA, 25 bp, Canis familiaris
ttggagtctggcaggtcaagcggcg

SEQ ID NO: 209294 - DNA, 25 bp, Canis familiaris
ttgaggatctccaggaccatcagcc

SEQ ID NO: 209295 - DNA, 25 bp, Canis familiaris
ttggatcattccagacacacacacc

SEQ ID NO: 209296 - DNA, 25 bp, Canis familiaris
ttgagtcctcatttgacacacacac

SEQ ID NO: 209297 - DNA, 25 bp, Canis familiaris
ttggtgctctatccaaaaaccagag

SEQ ID NO: 209298 - DNA, 25 bp, Canis familiaris
ttggatgtcctccgcaagaatcaca

SEQ ID NO: 209299 - DNA, 25 bp, Canis familiaris
ttgaggtaatctccggcatggcatc

SEQ ID NO: 209300 - DNA, 25 bp, Canis familiaris
ttgggtgatactccctcaagcccaa

SEQ ID NO: 209301 - DNA, 25 bp, Canis familiaris
ttgggttcctctcggaatgacgcaa

SEQ ID NO: 209302 - DNA, 25 bp, Canis familiaris
ttgggtctgaccttcgctatgacca

SEQ ID NO: 209303 - DNA, 25 bp, Canis familiaris
ttgggctgcatgtgattctgcttcc

SEQ ID NO: 209304 - DNA, 25 bp, Canis familiaris
ttgtgtgtgtgatattctgaccata

SEQ ID NO: 209305 - DNA, 25 bp, Canis familiaris
ttgtgttggatgattctgcccgaaa

SEQ ID NO: 209306 - DNA, 25 bp, Canis familiaris
ttgtttgtatcattccttcaaataa

SEQ ID NO: 209307 - DNA, 25 bp, Canis familiaris
ttgtggtgtgaccctgttcaattat

SEQ ID NO: 209308 - DNA, 25 bp, Canis familiaris
ttgtggttactgtttccagttgaat

SEQ ID NO: 209309 - DNA, 25 bp, Canis familiaris
ttgggtttttttgctctgatgaaaa

SEQ ID NO: 209310 - DNA, 25 bp, Canis familiaris
ttgtgagttcctggtttcttggaaa

SEQ ID NO: 209311 - DNA, 25 bp, Canis familiaris
ttgtgcatgtctgctgtttaaacag

SEQ ID NO: 209312 - DNA, 25 bp, Canis familiaris
ttgtacttcttgttcattaaatgtt

SEQ ID NO: 209313 - DNA, 25 bp, Canis familiaris
ttgtttgtcgtgttttctgaatgtt

SEQ ID NO: 209314 - DNA, 25 bp, Canis familiaris
ttgttttcagtgcgtttccagctca

SEQ ID NO: 209315 - DNA, 25 bp, Canis familiaris
ttgtatttagccaagatgtgttaac

SEQ ID NO: 209316 - DNA, 25 bp, Canis familiaris
ttgttgttacagacatgtgtcaaaa

SEQ ID NO: 209317 - DNA, 25 bp, Canis familiaris
ttgtgtgtgttacctgctctaagaa

SEQ ID NO: 209318 - DNA, 25 bp, Canis familiaris
ttgggtttcatcctggcactagaac

SEQ ID NO: 209319 - DNA, 25 bp, Canis familiaris
ttggctttgtcctggggaaactgga

SEQ ID NO: 209320 - DNA, 25 bp, Canis familiaris
ttggcttcacccctggggaaacgct

SEQ ID NO: 209321 - DNA, 25 bp, Canis familiaris
ttggtttctgccctagggaacacca

SEQ ID NO: 209322 - DNA, 25 bp, Canis familiaris
ttggctttctccccaagagaacatc

SEQ ID NO: 209323 - DNA, 25 bp, Canis familiaris
ttggtgattccaacaaagtccacac

SEQ ID NO: 209324 - DNA, 25 bp, Canis familiaris
ttgtgtttcgagtccagttccacac

SEQ ID NO: 209325 - DNA, 25 bp, Canis familiaris
ttgtgcttttgatttgcgtttccct

SEQ ID NO: 209326 - DNA, 25 bp, Canis familiaris
ttgtgttttatgtagaactcccaat

SEQ ID NO: 209327 - DNA, 25 bp, Canis familiaris
ttggtctctttgactaatccaccca

SEQ ID NO: 209328 - DNA, 25 bp, Canis familiaris
ttggctgttttgtcaactcgcatac

SEQ ID NO: 209329 - DNA, 25 bp, Canis familiaris
ttgtgcacttttacaagccgcaaag

SEQ ID NO: 209330 - DNA, 25 bp, Canis familiaris
ttgtgagtgttctcaagtctggggg

SEQ ID NO: 209331 - DNA, 25 bp, Canis familiaris
ttgtttgtatcataacattgcaggt

SEQ ID NO: 209332 - DNA, 25 bp, Canis familiaris
ttgtcttgtctcataccaatgtcgt

SEQ ID NO: 209333 - DNA, 25 bp, Canis familiaris
ttgtcctgctctcaatgccaattaa

SEQ ID NO: 209334 - DNA, 25 bp, Canis familiaris
ttgtcctgcctgtaactaattgaat

SEQ ID NO: 209335 - DNA, 25 bp, Canis familiaris
ttgagcttgcctttgactagttgta

SEQ ID NO: 209336 - DNA, 25 bp, Canis familiaris
ttgagcctggcttctcattgtgtca

SEQ ID NO: 209337 - DNA, 25 bp, Canis familiaris
ttgagcctttgagctctgcatctga

SEQ ID NO: 209338 - DNA, 25 bp, Canis familiaris
ttggcctcttcattcttgattgaac

SEQ ID NO: 209339 - DNA, 25 bp, Canis familiaris
ttgagcccttcatcaggctctgtgc

SEQ ID NO: 209340 - DNA, 25 bp, Canis familiaris
ttggccctgttagtgtcacttgttg

SEQ ID NO: 209341 - DNA, 25 bp, Canis familiaris
ttggctttttaggtcactccctaga

SEQ ID NO: 209342 - DNA, 25 bp, Canis familiaris
ttggttcgtcttttaatctcctaga

SEQ ID NO: 209343 - DNA, 25 bp, Canis familiaris
ttgggtcactttttatgtagttaat

SEQ ID NO: 209344 - DNA, 25 bp, Canis familiaris
ttgtgtctcctttggttgttggcta

SEQ ID NO: 209345 - DNA, 25 bp, Canis familiaris
ttgttgtcgttgttgttgttttaag

SEQ ID NO: 209346 - DNA, 25 bp, Canis familiaris
ttgtggtctttcattttgctttaaa

SEQ ID NO: 209347 - DNA, 25 bp, Canis familiaris
ttgggtttctcattccattgttgcc

SEQ ID NO: 209348 - DNA, 25 bp, Canis familiaris
ttgggcgtttagttctctttgccac

SEQ ID NO: 209349 - DNA, 25 bp, Canis familiaris
ttgagggtggatggtttgcatttct

SEQ ID NO: 209350 - DNA, 25 bp, Canis familiaris
ttggtgtgtggtgttgtctgtatat

SEQ ID NO: 209351 - DNA, 25 bp, Canis familiaris
ttgggttggtttacacttgcacata

SEQ ID NO: 209352 - DNA, 25 bp, Canis familiaris
ttgtggtctgagtgcagatccttaa

SEQ ID NO: 209353 - DNA, 25 bp, Canis familiaris
ttggcgtgctgaaatgaccctgtta

SEQ ID NO: 209354 - DNA, 25 bp, Canis familiaris
ttggcgctctgaggtggactttcta

SEQ ID NO: 209355 - DNA, 25 bp, Canis familiaris
ttgtgctgatcgtgctaaattttca

SEQ ID NO: 209356 - DNA, 25 bp, Canis familiaris
ttgagctgtatctgtaacattttct

SEQ ID NO: 209357 - DNA, 25 bp, Canis familiaris
ttgagcttatttgaacacattttta

SEQ ID NO: 209358 - DNA, 25 bp, Canis familiaris
ttggcttcatggcctaacactttga

SEQ ID NO: 209359 - DNA, 25 bp, Canis familiaris
ttggtctctgtgtttacaggtctga

SEQ ID NO: 209360 - DNA, 25 bp, Canis familiaris
ttgggattatatatccagtgccaga

SEQ ID NO: 209361 - DNA, 25 bp, Canis familiaris
ttgtggattttgttacaggacaaag

SEQ ID NO: 209362 - DNA, 25 bp, Canis familiaris
ttgggttttgacactggacttgcac

SEQ ID NO: 209363 - DNA, 25 bp, Canis familiaris
ttgttttttgccattttttgcctat

SEQ ID NO: 209364 - DNA, 25 bp, Canis familiaris
ttgtttcctgttattattgtttctg

SEQ ID NO: 209365 - DNA, 25 bp, Canis familiaris
ttgtctgtgttgtttgttagttttt

SEQ ID NO: 209366 - DNA, 25 bp, Canis familiaris
ttgtcatgagttgcatttcctttct

SEQ ID NO: 209367 - DNA, 25 bp, Canis familiaris
ttgacctgtttcatatcctttctga

SEQ ID NO: 209368 - DNA, 25 bp, Canis familiaris
ttgatttttgtcatatccctttcct

SEQ ID NO: 209369 - DNA, 25 bp, Canis familiaris
ttgttgattcgtgatgactgccttt

SEQ ID NO: 209370 - DNA, 25 bp, Canis familiaris
ttgtctaccgtcatagcaccatata

SEQ ID NO: 209371 - DNA, 25 bp, Canis familiaris
ttgtctcctgcgacttcaacagcaa

SEQ ID NO: 209372 - DNA, 25 bp, Canis familiaris
ttgtctcctgcgacttcaacagcaa

SEQ ID NO: 209373 - DNA, 25 bp, Canis familiaris
ttgtgctacgagatctcaaggaagt

SEQ ID NO: 209374 - DNA, 25 bp, Canis familiaris
ttgtgtaagactaggaagaagcatc

SEQ ID NO: 209375 - DNA, 25 bp, Canis familiaris
ttgtgtaaacaccgcacaccacaca

SEQ ID NO: 209376 - DNA, 25 bp, Canis familiaris
ttgttgaaggagcccacaccaggag

SEQ ID NO: 209377 - DNA, 25 bp, Canis familiaris
ttgttgccatggcctgcagaaccta

SEQ ID NO: 209378 - DNA, 25 bp, Canis familiaris
ttgttgccatgcagctatgtcacca

SEQ ID NO: 209379 - DNA, 25 bp, Canis familiaris
ttgggccagcaaggatgccacctac

SEQ ID NO: 209380 - DNA, 25 bp, Canis familiaris
ttggtgctgctcaaggatccatcca

SEQ ID NO: 209381 - DNA, 25 bp, Canis familiaris
ttggctgtggcaatagcatccatat

SEQ ID NO: 209382 - DNA, 25 bp, Canis familiaris
ttggctgatggccatccacttagtt

SEQ ID NO: 209383 - DNA, 25 bp, Canis familiaris
ttggctgattcatccaccaggtttt

SEQ ID NO: 209384 - DNA, 25 bp, Canis familiaris
ttggctttcagaaacccgtgttttg

SEQ ID NO: 209385 - DNA, 25 bp, Canis familiaris
ttggctcttagagtagaagcaggtt

SEQ ID NO: 209386 - DNA, 25 bp, Canis familiaris
ttgtgcctgtcggcgaagccagagc

SEQ ID NO: 209387 - DNA, 25 bp, Canis familiaris
ttgtgcctgcccagaagtgaggccc

SEQ ID NO: 209388 - DNA, 25 bp, Canis familiaris
ttgatggctgggaaggcctaccctc

SEQ ID NO: 209389 - DNA, 25 bp, Canis familiaris
ttgggggagaaggaccgcacactca

SEQ ID NO: 209390 - DNA, 25 bp, Canis familiaris
ttggtcttggaaggaccaagacatg

SEQ ID NO: 209391 - DNA, 25 bp, Canis familiaris
ttggcttttgactgtcctcagtgat

SEQ ID NO: 209392 - DNA, 25 bp, Canis familiaris
ttggctattctggacattttctgta

SEQ ID NO: 209393 - DNA, 25 bp, Canis familiaris
ttggcaaggctgcatattttcattg

SEQ ID NO: 209394 - DNA, 25 bp, Canis familiaris
ttgtgagagtgtcgtcgtttctgct

SEQ ID NO: 209395 - DNA, 25 bp, Canis familiaris
ttgtgatggtcgtcattgtctccta

SEQ ID NO: 209396 - DNA, 25 bp, Canis familiaris
ttgtgggtcgtttggcttcgacaag

SEQ ID NO: 209397 - DNA, 25 bp, Canis familiaris
ttggaggatcgatgctggcttccac

SEQ ID NO: 209398 - DNA, 25 bp, Canis familiaris
ttgtaggagaatatggtgtcctctc

SEQ ID NO: 209399 - DNA, 25 bp, Canis familiaris
ttgggatagaatccccttccttcac

SEQ ID NO: 209400 - DNA, 25 bp, Canis familiaris
ttgggaagaacttcacccacattcc

SEQ ID NO: 209401 - DNA, 25 bp, Canis familiaris
ttgaaagatgattcttcacccccat

SEQ ID NO: 209402 - DNA, 25 bp, Canis familiaris
ttgtcagcagagaatcttacctacc

SEQ ID NO: 209403 - DNA, 25 bp, Canis familiaris
ttgatcacccatacaagacaccacc

SEQ ID NO: 209404 - DNA, 25 bp, Canis familiaris
ttgacatccgtaaagacctctatgc

SEQ ID NO: 209405 - DNA, 25 bp, Canis familiaris
ttgtctcctcgaaaatccttcattc

SEQ ID NO: 209406 - DNA, 25 bp, Canis familiaris
ttgggctctcagtaatatcctattt

SEQ ID NO: 209407 - DNA, 25 bp, Canis familiaris
ttgtggccacacaagtaccatggtg

SEQ ID NO: 209408 - DNA, 25 bp, Canis familiaris
ttgggctgatcatcccagccaggtg

SEQ ID NO: 209409 - DNA, 25 bp, Canis familiaris
ttggaggaacctccacacagttttc

SEQ ID NO: 209410 - DNA, 25 bp, Canis familiaris
ttgttaaacttctaccactttgcca

SEQ ID NO: 209411 - DNA, 25 bp, Canis familiaris
ttggccaaatctttaccatctttta

SEQ ID NO: 209412 - DNA, 25 bp, Canis familiaris
ttggccagaattttcagagcagagt

SEQ ID NO: 209413 - DNA, 25 bp, Canis familiaris
ttgacacagacacgagacgccaggt

SEQ ID NO: 209414 - DNA, 25 bp, Canis familiaris
ttgagacaagactgacccagcggcg

SEQ ID NO: 209415 - DNA, 25 bp, Canis familiaris
ttggagctggaattaccgcggctgc

SEQ ID NO: 209416 - DNA, 25 bp, Canis familiaris
ttggtgtctgagtatacgtcggcgc

SEQ ID NO: 209417 - DNA, 25 bp, Canis familiaris
ttgagtgagctgatatccgtctcgc

SEQ ID NO: 209418 - DNA, 25 bp, Canis familiaris
ttgagtgatcttactccagcctggc

SEQ ID NO: 209419 - DNA, 25 bp, Canis familiaris
ttgatgatgagtcggctgacacccc

SEQ ID NO: 209420 - DNA, 25 bp, Canis familiaris
ttgatgggtctgatgtcatcccctg

SEQ ID NO: 209421 - DNA, 25 bp, Canis familiaris
ttgtagatgaatatgatcccaccat

SEQ ID NO: 209422 - DNA, 25 bp, Canis familiaris
ttgtgagcagttaggctcccaaatc

SEQ ID NO: 209423 - DNA, 25 bp, Canis familiaris
ttggacatgtctacatccccaagac

SEQ ID NO: 209424 - DNA, 25 bp, Canis familiaris
ttgaacagccttgacactctagact

SEQ ID NO: 209425 - DNA, 25 bp, Canis familiaris
ttggatcagccttagcacgttagcc

SEQ ID NO: 209426 - DNA, 25 bp, Canis familiaris
ttgggaggatttgctctctctgtca

SEQ ID NO: 209427 - DNA, 25 bp, Canis familiaris
ttggtgaagttatctctctgtccgt

SEQ ID NO: 209428 - DNA, 25 bp, Canis familiaris
ttggtggggatgtagtccctgccct

SEQ ID NO: 209429 - DNA, 25 bp, Canis familiaris
ttggatgctggtgtagatgccctgc

SEQ ID NO: 209430 - DNA, 25 bp, Canis familiaris
ttgtttgcagtcaggtgcaatcatg

SEQ ID NO: 209431 - DNA, 25 bp, Canis familiaris
ttgtttgcagtcctgggctgctcat

SEQ ID NO: 209432 - DNA, 25 bp, Canis familiaris
ttgtgctctgtctgagtggtgatca

SEQ ID NO: 209433 - DNA, 25 bp, Canis familiaris
ttgtatttgttggtgaggtcagttc

SEQ ID NO: 209434 - DNA, 25 bp, Canis familiaris
ttgttcttgtttttggtgagttcta

SEQ ID NO: 209435 - DNA, 25 bp, Canis familiaris
ttgtttcttttttcctgagactcca

SEQ ID NO: 209436 - DNA, 25 bp, Canis familiaris
ttgttctctcttattacttacttcc

SEQ ID NO: 209437 - DNA, 25 bp, Canis familiaris
ttggcttcacttattgacttttctc

SEQ ID NO: 209438 - DNA, 25 bp, Canis familiaris
ttggctaagcttttctgagttgatt

SEQ ID NO: 209439 - DNA, 25 bp, Canis familiaris
ttgtgtatattttactaggaattta

SEQ ID NO: 209440 - DNA, 25 bp, Canis familiaris
ttgtgtgtactttattttgttttca

SEQ ID NO: 209441 - DNA, 25 bp, Canis familiaris
ttggtaattttcatgactttttgca

SEQ ID NO: 209442 - DNA, 25 bp, Canis familiaris
ttgttattttttcatgacttttgca

SEQ ID NO: 209443 - DNA, 25 bp, Canis familiaris
ttgtttgtttttcagtctcattccc

SEQ ID NO: 209444 - DNA, 25 bp, Canis familiaris
ttgtttggttttgttctcatttgcc

SEQ ID NO: 209445 - DNA, 25 bp, Canis familiaris
ttgtcttgtcatttttgttctttac

SEQ ID NO: 209446 - DNA, 25 bp, Canis familiaris
ttggctcttcattggtttcatgctg

SEQ ID NO: 209447 - DNA, 25 bp, Canis familiaris
ttggtctctcaacttttaggcctga

SEQ ID NO: 209448 - DNA, 25 bp, Canis familiaris
ttggctcatctatattttggtcctt

SEQ ID NO: 209449 - DNA, 25 bp, Canis familiaris
ttgtgctgcttgtttactttttctt

SEQ ID NO: 209450 - DNA, 25 bp, Canis familiaris
ttgtctctgtatatgactccttcct

SEQ ID NO: 209451 - DNA, 25 bp, Canis familiaris
ttgtctcttgcatcatttccttgag

SEQ ID NO: 209452 - DNA, 25 bp, Canis familiaris
ttgtctttgcaggcttcttctgagc

SEQ ID NO: 209453 - DNA, 25 bp, Canis familiaris
ttgtggcttgcacctggcttgcaag

SEQ ID NO: 209454 - DNA, 25 bp, Canis familiaris
ttgtgggagcacatttctcatcatg

SEQ ID NO: 209455 - DNA, 25 bp, Canis familiaris
ttggagccacacaatctctgttcag

SEQ ID NO: 209456 - DNA, 25 bp, Canis familiaris
ttgaggcaaacaccatcttgtcctt

SEQ ID NO: 209457 - DNA, 25 bp, Canis familiaris
ttgatgggaaacctgcttctcctac

SEQ ID NO: 209458 - DNA, 25 bp, Canis familiaris
ttgatgggtattctgtgaccgccac

SEQ ID NO: 209459 - DNA, 25 bp, Canis familiaris
ttgagggtagccctgtgaccagcat

SEQ ID NO: 209460 - DNA, 25 bp, Canis familiaris
ttgtggtctctcggtgtgacacaca

SEQ ID NO: 209461 - DNA, 25 bp, Canis familiaris
ttgggtctgtagctggacctcaggg

SEQ ID NO: 209462 - DNA, 25 bp, Canis familiaris
ttggacatcttcggggacctgagga

SEQ ID NO: 209463 - DNA, 25 bp, Canis familiaris
ttggacatgctcatctaggaactgg

SEQ ID NO: 209464 - DNA, 25 bp, Canis familiaris
ttgtgacaccaagtgcctcaagcgg

SEQ ID NO: 209465 - DNA, 25 bp, Canis familiaris
ttgtgaccctgatgcccaaatgaga

SEQ ID NO: 209466 - DNA, 25 bp, Canis familiaris
ttgtactttgaaacgctaataaaat

SEQ ID NO: 209467 - DNA, 25 bp, Canis familiaris
ttgaccgttaaaattgcaaaaacat

SEQ ID NO: 209468 - DNA, 25 bp, Canis familiaris
ttgagggtagactttgtgggaaaca

SEQ ID NO: 209469 - DNA, 25 bp, Canis familiaris
ttgagaggtaattacatagtgtaaa

SEQ ID NO: 209470 - DNA, 25 bp, Canis familiaris
ttgggtgatagaaaataatggaaat

SEQ ID NO: 209471 - DNA, 25 bp, Canis familiaris
ttggtgctgtagaaaggaagaagaa

SEQ ID NO: 209472 - DNA, 25 bp, Canis familiaris
ttggcctgtcggtcggggaaggagg

SEQ ID NO: 209473 - DNA, 25 bp, Canis familiaris
ttgtcctggggtggatggggtaagg

SEQ ID NO: 209474 - DNA, 25 bp, Canis familiaris
ttggccatctgctggcgtggggtaa

SEQ ID NO: 209475 - DNA, 25 bp, Canis familiaris
ttgtcccgcacgtgtcggtgtatga

SEQ ID NO: 209476 - DNA, 25 bp, Canis familiaris
ttgtccccctggatacagtgtgcat

SEQ ID NO: 209477 - DNA, 25 bp, Canis familiaris
ttgtcctcccttgtatcgaatatta

SEQ ID NO: 209478 - DNA, 25 bp, Canis familiaris
ttgtcactcccattaaaccagattg

SEQ ID NO: 209479 - DNA, 25 bp, Canis familiaris
ttgtcactagctctatatacacaga

SEQ ID NO: 209480 - DNA, 25 bp, Canis familiaris
ttgtcgctgaggccatagtcaatag

SEQ ID NO: 209481 - DNA, 25 bp, Canis familiaris
ttgtgcctgaggccataggttcata

SEQ ID NO: 209482 - DNA, 25 bp, Canis familiaris
ttggccaagcacttagatgttctga

SEQ ID NO: 209483 - DNA, 25 bp, Canis familiaris
ttgagccaagccggcagtttgtgaa

SEQ ID NO: 209484 - DNA, 25 bp, Canis familiaris
ttggccaccctcactatgtgtgaag

SEQ ID NO: 209485 - DNA, 25 bp, Canis familiaris
ttggattccctcatcaaggctacaa

SEQ ID NO: 209486 - DNA, 25 bp, Canis familiaris
ttggtttccacagcattgagctaaa

SEQ ID NO: 209487 - DNA, 25 bp, Canis familiaris
ttgattcattctgcaaattagctac

SEQ ID NO: 209488 - DNA, 25 bp, Canis familiaris
ttgtgacatcttgaaaataatacca

SEQ ID NO: 209489 - DNA, 25 bp, Canis familiaris
ttgtatcattccttcaaataaagta

SEQ ID NO: 209490 - DNA, 25 bp, Canis familiaris
ttgtctttcacattaaaagaaacac

SEQ ID NO: 209491 - DNA, 25 bp, Canis familiaris
ttgtctcttccaaagcaaagccata

SEQ ID NO: 209492 - DNA, 25 bp, Canis familiaris
ttgtctcttccaaagcaaagccata

SEQ ID NO: 209493 - DNA, 25 bp, Canis familiaris
ttgtcaccccagagaaggccatcaa

SEQ ID NO: 209494 - DNA, 25 bp, Canis familiaris
ttgtacctatctttgaaggccatta

SEQ ID NO: 209495 - DNA, 25 bp, Canis familiaris
ttgtgccccactttggaagcaataa

SEQ ID NO: 209496 - DNA, 25 bp, Canis familiaris
ttgtacgcccatttctcagaaataa

SEQ ID NO: 209497 - DNA, 25 bp, Canis familiaris
ttgtataggtatttcatagccaaaa

SEQ ID NO: 209498 - DNA, 25 bp, Canis familiaris
ttgtatattggtctcatatccacga

SEQ ID NO: 209499 - DNA, 25 bp, Canis familiaris
ttgtatttgttcattgcttgccaga

SEQ ID NO: 209500 - DNA, 25 bp, Canis familiaris
ttgattttattgacgatctggccga

SEQ ID NO: 209501 - DNA, 25 bp, Canis familiaris
ttgattttccttcatctgtgaccag

SEQ ID NO: 209502 - DNA, 25 bp, Canis familiaris
ttgttgttcgttccattgtaccatc

SEQ ID NO: 209503 - DNA, 25 bp, Canis familiaris
ttgatttattctttcttgcgacctc

SEQ ID NO: 209504 - DNA, 25 bp, Canis familiaris
ttgtcttgtcttctcttgcagagtc

SEQ ID NO: 209505 - DNA, 25 bp, Canis familiaris
ttgtctattgccagatcctcaagtc

SEQ ID NO: 209506 - DNA, 25 bp, Canis familiaris
ttgtctcctgccagatgtggcaaga

SEQ ID NO: 209507 - DNA, 25 bp, Canis familiaris
ttgtctccactgagatgatcgagat

SEQ ID NO: 209508 - DNA, 25 bp, Canis familiaris
ttgtcctcactcagttctagtactg

SEQ ID NO: 209509 - DNA, 25 bp, Canis familiaris
ttgtctccgtagtatttcagtaccg

SEQ ID NO: 209510 - DNA, 25 bp, Canis familiaris
ttgtcctggccgttatactgtacca

SEQ ID NO: 209511 - DNA, 25 bp, Canis familiaris
ttgttgcggtcggtcagaactaccc

SEQ ID NO: 209512 - DNA, 25 bp, Canis familiaris
ttgggtggtgcacatacgactacac

SEQ ID NO: 209513 - DNA, 25 bp, Canis familiaris
ttgggtgctgctgctattcagacta

SEQ ID NO: 209514 - DNA, 25 bp, Canis familiaris
ttgtggctcgattctcattctgaaa

SEQ ID NO: 209515 - DNA, 25 bp, Canis familiaris
ttggtctcgtagtctatctatagat

SEQ ID NO: 209516 - DNA, 25 bp, Canis familiaris
ttggtatcactaatgctactgcaaa

SEQ ID NO: 209517 - DNA, 25 bp, Canis familiaris
ttggctcaactaatctacttggact

SEQ ID NO: 209518 - DNA, 25 bp, Canis familiaris
ttggctcaactaatctacttggact

SEQ ID NO: 209519 - DNA, 25 bp, Canis familiaris
ttgtcctaaaatacacctggactcg

SEQ ID NO: 209520 - DNA, 25 bp, Canis familiaris
ttgacctgagaactacgccatgtac

SEQ ID NO: 209521 - DNA, 25 bp, Canis familiaris
ttggcgctgacagctacacgttcac

SEQ ID NO: 209522 - DNA, 25 bp, Canis familiaris
ttgagtatgacatctccacgtccac

SEQ ID NO: 209523 - DNA, 25 bp, Canis familiaris
ttgagtctacattctccaaggcaga

SEQ ID NO: 209524 - DNA, 25 bp, Canis familiaris
ttgtcttatgcttctctcagggaaa

SEQ ID NO: 209525 - DNA, 25 bp, Canis familiaris
ttgtcattgtcattgcctagaagta

SEQ ID NO: 209526 - DNA, 25 bp, Canis familiaris
ttgtgtcgctcattgcctaagatgc

SEQ ID NO: 209527 - DNA, 25 bp, Canis familiaris
ttgtgctactcttctgctaatatgc

SEQ ID NO: 209528 - DNA, 25 bp, Canis familiaris
ttgtcatcctcttctatcaagtgta

SEQ ID NO: 209529 - DNA, 25 bp, Canis familiaris
ttgtcatccacttcttgaggtgccc

SEQ ID NO: 209530 - DNA, 25 bp, Canis familiaris
ttgtgacacactctatgcagggcat

SEQ ID NO: 209531 - DNA, 25 bp, Canis familiaris
ttgatacaatgccatttactggata

SEQ ID NO: 209532 - DNA, 25 bp, Canis familiaris
ttgtcacaagcgttcgcatctgcct

SEQ ID NO: 209533 - DNA, 25 bp, Canis familiaris
ttgtcagcaatgcatcctgcaccac

SEQ ID NO: 209534 - DNA, 25 bp, Canis familiaris
ttgagcagaatgttcagcgctccat

SEQ ID NO: 209535 - DNA, 25 bp, Canis familiaris
ttggagatatgcacagctctgcctc

SEQ ID NO: 209536 - DNA, 25 bp, Canis familiaris
ttgtggatatcatcatactgcctat

SEQ ID NO: 209537 - DNA, 25 bp, Canis familiaris
ttgatatttcatgctagtgcctcac

SEQ ID NO: 209538 - DNA, 25 bp, Canis familiaris
ttgatatttaccttgtgtgctgctc

SEQ ID NO: 209539 - DNA, 25 bp, Canis familiaris
ttgatgattttcctcttggctggca

SEQ ID NO: 209540 - DNA, 25 bp, Canis familiaris
ttgtgattgttcactggctctgcca

SEQ ID NO: 209541 - DNA, 25 bp, Canis familiaris
ttgatatattgaaactggcctgaaa

SEQ ID NO: 209542 - DNA, 25 bp, Canis familiaris
ttgttattgatatctcggatacaat

SEQ ID NO: 209543 - DNA, 25 bp, Canis familiaris
ttgtctttgtggtctctggtactat

SEQ ID NO: 209544 - DNA, 25 bp, Canis familiaris
ttgatcttcttttcctggatcttct

SEQ ID NO: 209545 - DNA, 25 bp, Canis familiaris
ttgatttcagctcagcctgtgatct

SEQ ID NO: 209546 - DNA, 25 bp, Canis familiaris
ttgatgggctctcagccctgagtgt

SEQ ID NO: 209547 - DNA, 25 bp, Canis familiaris
ttggaggatcatcactctcgaggct

SEQ ID NO: 209548 - DNA, 25 bp, Canis familiaris
ttgggaatctccctgtcagggctcc

SEQ ID NO: 209549 - DNA, 25 bp, Canis familiaris
ttggggacactccttggaggtctcc

SEQ ID NO: 209550 - DNA, 25 bp, Canis familiaris
ttgggggactgctcggagaagccac

SEQ ID NO: 209551 - DNA, 25 bp, Canis familiaris
ttgggtggactgttctaaatagtta

SEQ ID NO: 209552 - DNA, 25 bp, Canis familiaris
ttgagttggccttcttggactttta

SEQ ID NO: 209553 - DNA, 25 bp, Canis familiaris
ttggttggtctgtgatggatttgtc

SEQ ID NO: 209554 - DNA, 25 bp, Canis familiaris
ttggtgtgttctgtggagtttctcc

SEQ ID NO: 209555 - DNA, 25 bp, Canis familiaris
ttgggtgttgtcctcagagtacctc

SEQ ID NO: 209556 - DNA, 25 bp, Canis familiaris
ttgtcgatgttgtcgtgcaggatct

SEQ ID NO: 209557 - DNA, 25 bp, Canis familiaris
ttgtatatgtgttcagactctgtct

SEQ ID NO: 209558 - DNA, 25 bp, Canis familiaris
ttgtcactgtcatcagaatctgtcg

SEQ ID NO: 209559 - DNA, 25 bp, Canis familiaris
ttgtacttagtctagattgccgtct

SEQ ID NO: 209560 - DNA, 25 bp, Canis familiaris
ttgatagctctttctcgattccgtg

SEQ ID NO: 209561 - DNA, 25 bp, Canis familiaris
ttgtacctatgtgctgttcctgtgc

SEQ ID NO: 209562 - DNA, 25 bp, Canis familiaris
ttgtagtctggtgcatgtgtcctct

SEQ ID NO: 209563 - DNA, 25 bp, Canis familiaris
ttgtgtgttggaacttgtccctgtc

SEQ ID NO: 209564 - DNA, 25 bp, Canis familiaris
ttgggatggacaactttcctcctct

SEQ ID NO: 209565 - DNA, 25 bp, Canis familiaris
ttgtggtacacctttattctccttt

SEQ ID NO: 209566 - DNA, 25 bp, Canis familiaris
ttggtgttcacatcttgttctccat

SEQ ID NO: 209567 - DNA, 25 bp, Canis familiaris
ttggtttcacatcttggcttttatg

SEQ ID NO: 209568 - DNA, 25 bp, Canis familiaris
ttgtttctcctgagggcagtttaga

SEQ ID NO: 209569 - DNA, 25 bp, Canis familiaris
ttgtttcttcaattgggactgttaa

SEQ ID NO: 209570 - DNA, 25 bp, Canis familiaris
ttgtcttgcttaacatggcagactt

SEQ ID NO: 209571 - DNA, 25 bp, Canis familiaris
ttgtctagtatcctatacagcactt

SEQ ID NO: 209572 - DNA, 25 bp, Canis familiaris
ttgtctgcagttattaagctcgtag

SEQ ID NO: 209573 - DNA, 25 bp, Canis familiaris
ttgtgtgacttcattgagactcatt

SEQ ID NO: 209574 - DNA, 25 bp, Canis familiaris
ttggtgacttcacttgatgtcgagt

SEQ ID NO: 209575 - DNA, 25 bp, Canis familiaris
ttggtacatctcgttcgtccaatct

SEQ ID NO: 209576 - DNA, 25 bp, Canis familiaris
ttggtacatctcgttcgtccaatct

SEQ ID NO: 209577 - DNA, 25 bp, Canis familiaris
ttggtacatctcgttcgtccaatct

SEQ ID NO: 209578 - DNA, 25 bp, Canis familiaris
ttgtaacattccatctatgcccatt

SEQ ID NO: 209579 - DNA, 25 bp, Canis familiaris
ttgtaacatacccgtgaccctacaa

SEQ ID NO: 209580 - DNA, 25 bp, Canis familiaris
ttgtaatatcaagcaggacccttaa

SEQ ID NO: 209581 - DNA, 25 bp, Canis familiaris
ttgtcatcaacagccgtgaccactt

SEQ ID NO: 209582 - DNA, 25 bp, Canis familiaris
ttgtcacaaccaaggtcccatttcc

SEQ ID NO: 209583 - DNA, 25 bp, Canis familiaris
ttgtctatactttggccccaattca

SEQ ID NO: 209584 - DNA, 25 bp, Canis familiaris
ttgttatactttgcgcacacacaca

SEQ ID NO: 209585 - DNA, 25 bp, Canis familiaris
ttgtttatctttatgcaggactgca

SEQ ID NO: 209586 - DNA, 25 bp, Canis familiaris
ttgtatctactttaccagctgaccc

SEQ ID NO: 209587 - DNA, 25 bp, Canis familiaris
ttgtcatgaactatatccgtaacct

SEQ ID NO: 209588 - DNA, 25 bp, Canis familiaris
ttggcacaactagtatctgctgtaa

SEQ ID NO: 209589 - DNA, 25 bp, Canis familiaris
ttggcgcaacggtatcaggtgaaac

SEQ ID NO: 209590 - DNA, 25 bp, Canis familiaris
ttgtgcgcacacttgatgaaggtgt

SEQ ID NO: 209591 - DNA, 25 bp, Canis familiaris
ttgagctgcaaaagctgccaggatt

SEQ ID NO: 209592 - DNA, 25 bp, Canis familiaris
ttgatctcacaaagtcatgcagaca

SEQ ID NO: 209593 - DNA, 25 bp, Canis familiaris
ttgtcatcacagctgctccagaata

SEQ ID NO: 209594 - DNA, 25 bp, Canis familiaris
ttgtgatcacagtgccagccaacac

SEQ ID NO: 209595 - DNA, 25 bp, Canis familiaris
ttgtttcagcagccaaccaacacca

SEQ ID NO: 209596 - DNA, 25 bp, Canis familiaris
ttggcttcatgcagcaactcaaaaa

SEQ ID NO: 209597 - DNA, 25 bp, Canis familiaris
ttgagcctgcagctggaccaagaca

SEQ ID NO: 209598 - DNA, 25 bp, Canis familiaris
ttggctcatgagctgcgtctaaatc

SEQ ID NO: 209599 - DNA, 25 bp, Canis familiaris
ttgagtcagatgctttcatttacac

SEQ ID NO: 209600 - DNA, 25 bp, Canis familiaris
ttgagtcagatgctttcatttacac

SEQ ID NO: 209601 - DNA, 25 bp, Canis familiaris
ttgagagcaatgtctttcttccaat

SEQ ID NO: 209602 - DNA, 25 bp, Canis familiaris
ttgtagctagcttttcttccattga

SEQ ID NO: 209603 - DNA, 25 bp, Canis familiaris
ttgtattagctgatggttccacgtt

SEQ ID NO: 209604 - DNA, 25 bp, Canis familiaris
ttgagttagcttggagctctccatc

SEQ ID NO: 209605 - DNA, 25 bp, Canis familiaris
ttgagttgactgatggccagcctct

SEQ ID NO: 209606 - DNA, 25 bp, Canis familiaris
ttgtttgaatggagccacctgcgtg

SEQ ID NO: 209607 - DNA, 25 bp, Canis familiaris
ttgtggtgagggaggccttgctgtc

SEQ ID NO: 209608 - DNA, 25 bp, Canis familiaris
ttgtggtagtgggggactgcgttcg

SEQ ID NO: 209609 - DNA, 25 bp, Canis familiaris
ttgtggggggagggcaggcatttcg

SEQ ID NO: 209610 - DNA, 25 bp, Canis familiaris
ttgggagctggggccgaggttgctc

SEQ ID NO: 209611 - DNA, 25 bp, Canis familiaris
ttggaagctggcgccatgactttcc

SEQ ID NO: 209612 - DNA, 25 bp, Canis familiaris
ttggaatgttgcccctgagtttaac

SEQ ID NO: 209613 - DNA, 25 bp, Canis familiaris
ttggaggattctccgctggcttata

SEQ ID NO: 209614 - DNA, 25 bp, Canis familiaris
ttgggggtctgagcatggctttgaa

SEQ ID NO: 209615 - DNA, 25 bp, Canis familiaris
ttggtgggttgttctagtactgtat

SEQ ID NO: 209616 - DNA, 25 bp, Canis familiaris
ttgggggtgagttttgccacatgta

SEQ ID NO: 209617 - DNA, 25 bp, Canis familiaris
ttggaggggaagtaatgtcactgat

SEQ ID NO: 209618 - DNA, 25 bp, Canis familiaris
ttggggggaatatcactctctcata

SEQ ID NO: 209619 - DNA, 25 bp, Canis familiaris
ttgtcgtgtgttaattactcctcta

SEQ ID NO: 209620 - DNA, 25 bp, Canis familiaris
ttgtctctttctagaaactctttca

SEQ ID NO: 209621 - DNA, 25 bp, Canis familiaris
ttgttctttctcaaatcaatccccc

SEQ ID NO: 209622 - DNA, 25 bp, Canis familiaris
ttggaatttttaccatcatcctccc

SEQ ID NO: 209623 - DNA, 25 bp, Canis familiaris
ttggcgactttgaagccttgccacc

SEQ ID NO: 209624 - DNA, 25 bp, Canis familiaris
ttgagctaatttgtgcgttcccacc

SEQ ID NO: 209625 - DNA, 25 bp, Canis familiaris
ttgagtgaaatctctggttcccttc

SEQ ID NO: 209626 - DNA, 25 bp, Canis familiaris
ttggaaacatcgtttgtatcccctc

SEQ ID NO: 209627 - DNA, 25 bp, Canis familiaris
ttggacaacagtgtagcttccccca

SEQ ID NO: 209628 - DNA, 25 bp, Canis familiaris
ttgtggcaaactggaaccacccacc

SEQ ID NO: 209629 - DNA, 25 bp, Canis familiaris
ttgtggagaaatgtgtcgcctcccc

SEQ ID NO: 209630 - DNA, 25 bp, Canis familiaris
ttgttagacttgggcaccattcccc

SEQ ID NO: 209631 - DNA, 25 bp, Canis familiaris
ttgtgatatacttgcgtgcccaggc

SEQ ID NO: 209632 - DNA, 25 bp, Canis familiaris
ttgtggtacattgtgcccagcggac

SEQ ID NO: 209633 - DNA, 25 bp, Canis familiaris
ttgtcttgtcattaatcgccaggga

SEQ ID NO: 209634 - DNA, 25 bp, Canis familiaris
ttgtgcaatctttgaatccccgtac

SEQ ID NO: 209635 - DNA, 25 bp, Canis familiaris
ttgtcaattgtgtaacccgagttgg

SEQ ID NO: 209636 - DNA, 25 bp, Canis familiaris
ttgttcttagtattccatgggttgg

SEQ ID NO: 209637 - DNA, 25 bp, Canis familiaris
ttgattttcagtatgccaatggact

SEQ ID NO: 209638 - DNA, 25 bp, Canis familiaris
ttgattttggtttgcccatctacct

SEQ ID NO: 209639 - DNA, 25 bp, Canis familiaris
ttgttttgtttgtgtctctgatcct

SEQ ID NO: 209640 - DNA, 25 bp, Canis familiaris
ttgttttggtattttgctgctgttt

SEQ ID NO: 209641 - DNA, 25 bp, Canis familiaris
ttgtattgtggttttttgccttgag

SEQ ID NO: 209642 - DNA, 25 bp, Canis familiaris
ttgtattcttcttttatcctcttga

SEQ ID NO: 209643 - DNA, 25 bp, Canis familiaris
ttgtcatttattcattgtccccaga

SEQ ID NO: 209644 - DNA, 25 bp, Canis familiaris
ttgtattctttagttgtaagccaag

SEQ ID NO: 209645 - DNA, 25 bp, Canis familiaris
ttgtttcctgtgtctgtgtaggctc

SEQ ID NO: 209646 - DNA, 25 bp, Canis familiaris
ttggatatcctggttctgtgggctc

SEQ ID NO: 209647 - DNA, 25 bp, Canis familiaris
ttggagtcctgggatcgagttctgc

SEQ ID NO: 209648 - DNA, 25 bp, Canis familiaris
ttgggcgcctggtcaccagggctgc

SEQ ID NO: 209649 - DNA, 25 bp, Canis familiaris
ttgggtgcgtgtgcacagaggcgcc

SEQ ID NO: 209650 - DNA, 25 bp, Canis familiaris
ttgggctgcgttcgcagtgtggccc

SEQ ID NO: 209651 - DNA, 25 bp, Canis familiaris
ttggagcttttgccattgagccacg

SEQ ID NO: 209652 - DNA, 25 bp, Canis familiaris
ttgtatcttttgccttgatgtcctg

SEQ ID NO: 209653 - DNA, 25 bp, Canis familiaris
ttgttcttttggctcgtcacagaga

SEQ ID NO: 209654 - DNA, 25 bp, Canis familiaris
ttgttttttgtgctcagcggccaga

SEQ ID NO: 209655 - DNA, 25 bp, Canis familiaris
ttgtttcttcttctgcactagtaat

SEQ ID NO: 209656 - DNA, 25 bp, Canis familiaris
ttggttctctttttcaccatgtcaa

SEQ ID NO: 209657 - DNA, 25 bp, Canis familiaris
ttggcttcagcttttgccaactgta

SEQ ID NO: 209658 - DNA, 25 bp, Canis familiaris
ttggttccttctggcacaattttag

SEQ ID NO: 209659 - DNA, 25 bp, Canis familiaris
ttgtcccctttggagcagctattta

SEQ ID NO: 209660 - DNA, 25 bp, Canis familiaris
ttgtccaacttataccttttagtca

SEQ ID NO: 209661 - DNA, 25 bp, Canis familiaris
ttgtccacagtgataaccttctcaa

SEQ ID NO: 209662 - DNA, 25 bp, Canis familiaris
ttggacacagggaaacactgactta

SEQ ID NO: 209663 - DNA, 25 bp, Canis familiaris
ttggaccggcgcaagacggaccaga

SEQ ID NO: 209664 - DNA, 25 bp, Canis familiaris
ttggaccggcgcaagacggaccaga

SEQ ID NO: 209665 - DNA, 25 bp, Canis familiaris
ttggaccggcgcaagacggaccaga

SEQ ID NO: 209666 - DNA, 25 bp, Canis familiaris
ttggacgggcagagcatcaacccca

SEQ ID NO: 209667 - DNA, 25 bp, Canis familiaris
ttggacgagtggaccaaccagccca

SEQ ID NO: 209668 - DNA, 25 bp, Canis familiaris
ttgtgccagtgtgggccagaccact

SEQ ID NO: 209669 - DNA, 25 bp, Canis familiaris
ttgtgctttctgcaccagacagcct

SEQ ID NO: 209670 - DNA, 25 bp, Canis familiaris
ttgtttttgctctgctgaatgcctc

SEQ ID NO: 209671 - DNA, 25 bp, Canis familiaris
ttggtgtactcctagataatcctcg

SEQ ID NO: 209672 - DNA, 25 bp, Canis familiaris
ttggttgacggaagtttcctgcggg

SEQ ID NO: 209673 - DNA, 25 bp, Canis familiaris
ttgggggggactagattccagcggg

SEQ ID NO: 209674 - DNA, 25 bp, Canis familiaris
ttggggagcaagatttctccagcag

SEQ ID NO: 209675 - DNA, 25 bp, Canis familiaris
ttggggcacaggactgcccccaagt

SEQ ID NO: 209676 - DNA, 25 bp, Canis familiaris
ttgggagcaagatttcccccagcag

SEQ ID NO: 209677 - DNA, 25 bp, Canis familiaris
ttgggagcaaatccagacgacctga

SEQ ID NO: 209678 - DNA, 25 bp, Canis familiaris
ttggagagcaagcccaaacacgtag

SEQ ID NO: 209679 - DNA, 25 bp, Canis familiaris
ttgggagccagctgcaaccagcagt

SEQ ID NO: 209680 - DNA, 25 bp, Canis familiaris
ttggacagcacctgtcaccaggatc

SEQ ID NO: 209681 - DNA, 25 bp, Canis familiaris
ttggacatcacctgtcaccaggacc

SEQ ID NO: 209682 - DNA, 25 bp, Canis familiaris
ttggaatccgaagcctcagagctcc

SEQ ID NO: 209683 - DNA, 25 bp, Canis familiaris
ttggatgtcggattcctctataccc

SEQ ID NO: 209684 - DNA, 25 bp, Canis familiaris
ttggataggtttccgctatgacccc

SEQ ID NO: 209685 - DNA, 25 bp, Canis familiaris
ttggcattgtgtgttcctatggccg

SEQ ID NO: 209686 - DNA, 25 bp, Canis familiaris
ttggcaagatgctgtgcccttggca

SEQ ID NO: 209687 - DNA, 25 bp, Canis familiaris
ttggaggagcatggtcccttggaca

SEQ ID NO: 209688 - DNA, 25 bp, Canis familiaris
ttgtgacaagcacatccctgggaaa

SEQ ID NO: 209689 - DNA, 25 bp, Canis familiaris
ttgtgaaagccttcctttggatttc

SEQ ID NO: 209690 - DNA, 25 bp, Canis familiaris
ttgtgaggagccacctggggaatcc

SEQ ID NO: 209691 - DNA, 25 bp, Canis familiaris
ttgtgaggatccacctagcgtcctc

SEQ ID NO: 209692 - DNA, 25 bp, Canis familiaris
ttgtggtataattgcccaggtcccc

SEQ ID NO: 209693 - DNA, 25 bp, Canis familiaris
ttgtagtgataatcctcatttctca

SEQ ID NO: 209694 - DNA, 25 bp, Canis familiaris
ttgtatgtcatactccaccatttat

SEQ ID NO: 209695 - DNA, 25 bp, Canis familiaris
ttggcattcatattacctatttacg

SEQ ID NO: 209696 - DNA, 25 bp, Canis familiaris
ttggtatctctttccattttaatgg

SEQ ID NO: 209697 - DNA, 25 bp, Canis familiaris
ttgggtcttctgcgatctttgaatg

SEQ ID NO: 209698 - DNA, 25 bp, Canis familiaris
ttggtatttctgatccttctgacat

SEQ ID NO: 209699 - DNA, 25 bp, Canis familiaris
ttgggttgccatagtcacatttaca

SEQ ID NO: 209700 - DNA, 25 bp, Canis familiaris
ttgggtgtgctgttgtgaaattgaa

SEQ ID NO: 209701 - DNA, 25 bp, Canis familiaris
ttgtgaggctctttctataaatacc

SEQ ID NO: 209702 - DNA, 25 bp, Canis familiaris
ttgtgagcgtcagtgttgatacgat

SEQ ID NO: 209703 - DNA, 25 bp, Canis familiaris
ttgtacaggagggtatgccgcatac

SEQ ID NO: 209704 - DNA, 25 bp, Canis familiaris
ttgtcacagtgggtgagtgccgccc

SEQ ID NO: 209705 - DNA, 25 bp, Canis familiaris
ttgtcacagtgggtgagtgccgccc

SEQ ID NO: 209706 - DNA, 25 bp, Canis familiaris
ttgtcatcaacgggaagcccatcac

SEQ ID NO: 209707 - DNA, 25 bp, Canis familiaris
ttgtctcaaagattaagccatgcat

SEQ ID NO: 209708 - DNA, 25 bp, Canis familiaris
ttgttcacagaataagcccagtcca

SEQ ID NO: 209709 - DNA, 25 bp, Canis familiaris
ttgttcctaatagcagccaacctcc

SEQ ID NO: 209710 - DNA, 25 bp, Canis familiaris
ttgtcaccgttatcaccaaagtcct

SEQ ID NO: 209711 - DNA, 25 bp, Canis familiaris
ttggaccagtattacccacaacctc

SEQ ID NO: 209712 - DNA, 25 bp, Canis familiaris
ttgggctgagtaattccggaagcct

SEQ ID NO: 209713 - DNA, 25 bp, Canis familiaris
ttgtcttgagttttcctggaggctt

SEQ ID NO: 209714 - DNA, 25 bp, Canis familiaris
ttgtttgggggtctgagcatggctt

SEQ ID NO: 209715 - DNA, 25 bp, Canis familiaris
ttggaggggggtctaatgcgcagta

SEQ ID NO: 209716 - DNA, 25 bp, Canis familiaris
ttgggtagggttcctgcaagcacac

SEQ ID NO: 209717 - DNA, 25 bp, Canis familiaris
ttggagtctgaggttccgacaggcc

SEQ ID NO: 209718 - DNA, 25 bp, Canis familiaris
ttgaggttgatggggcctccactgc

SEQ ID NO: 209719 - DNA, 25 bp, Canis familiaris
ttgtggttgtgtgtggcccactgca

SEQ ID NO: 209720 - DNA, 25 bp, Canis familiaris
ttgtgtgggtgcagggccacctaag

SEQ ID NO: 209721 - DNA, 25 bp, Canis familiaris
ttgttgcgttgaattgcgccacccg

SEQ ID NO: 209722 - DNA, 25 bp, Canis familiaris
ttgggccttgatatatgccaccctc

SEQ ID NO: 209723 - DNA, 25 bp, Canis familiaris
ttgggcctattgaaaacacctgctc

SEQ ID NO: 209724 - DNA, 25 bp, Canis familiaris
ttggtgcccaggaaacacccatcac

SEQ ID NO: 209725 - DNA, 25 bp, Canis familiaris
ttgaggtccgagttacaccaaccag

SEQ ID NO: 209726 - DNA, 25 bp, Canis familiaris
ttgggtgaccatgtaacccacctgc

SEQ ID NO: 209727 - DNA, 25 bp, Canis familiaris
ttgggtgaccatgtaacccacctgc

SEQ ID NO: 209728 - DNA, 25 bp, Canis familiaris
ttggggggctgcatagcccccttgc

SEQ ID NO: 209729 - DNA, 25 bp, Canis familiaris
ttggggggtgatgaggccacccttc

SEQ ID NO: 209730 - DNA, 25 bp, Canis familiaris
ttggggtaggggggccatacacatt

SEQ ID NO: 209731 - DNA, 25 bp, Canis familiaris
ttggaagtctggcagggcctggcac

SEQ ID NO: 209732 - DNA, 25 bp, Canis familiaris
ttggaacttgtgaagtccctgtgcc

SEQ ID NO: 209733 - DNA, 25 bp, Canis familiaris
ttggctaagtgtcagcccgtgttcc

SEQ ID NO: 209734 - DNA, 25 bp, Canis familiaris
ttggctacagaacagctccaggttc

SEQ ID NO: 209735 - DNA, 25 bp, Canis familiaris
ttggcttctgtaaagactaggagtc

SEQ ID NO: 209736 - DNA, 25 bp, Canis familiaris
ttgtgctttgtatcagttagtgctg

SEQ ID NO: 209737 - DNA, 25 bp, Canis familiaris
ttggccttgatctggtgtttgctgc

SEQ ID NO: 209738 - DNA, 25 bp, Canis familiaris
ttggtttgaactcttttgctcctaa

SEQ ID NO: 209739 - DNA, 25 bp, Canis familiaris
ttggttttacttatagtccctcaca

SEQ ID NO: 209740 - DNA, 25 bp, Canis familiaris
ttggggtcttttgtggttccataca

SEQ ID NO: 209741 - DNA, 25 bp, Canis familiaris
ttgggggtgtttgtgtggtattgag

SEQ ID NO: 209742 - DNA, 25 bp, Canis familiaris
ttgtgggaggtcctttgtggctttt

SEQ ID NO: 209743 - DNA, 25 bp, Canis familiaris
ttgtgggaagtcatcctggcttggt

SEQ ID NO: 209744 - DNA, 25 bp, Canis familiaris
ttgtgtggaaccatcatcttgtctc

SEQ ID NO: 209745 - DNA, 25 bp, Canis familiaris
ttggaagtgactgtctcttgctctc

SEQ ID NO: 209746 - DNA, 25 bp, Canis familiaris
ttgggaatatctgtgtcctcattgc

SEQ ID NO: 209747 - DNA, 25 bp, Canis familiaris
ttgggaattgtgggtcaacaagaaa

SEQ ID NO: 209748 - DNA, 25 bp, Canis familiaris
ttggggtctgtgggttacatcgttg

SEQ ID NO: 209749 - DNA, 25 bp, Canis familiaris
ttgggtgcttttttgtcacatcagt

SEQ ID NO: 209750 - DNA, 25 bp, Canis familiaris
ttggtggcattgctattgatccctg

SEQ ID NO: 209751 - DNA, 25 bp, Canis familiaris
ttggggcagctgctgaggtcgtgtg

SEQ ID NO: 209752 - DNA, 25 bp, Canis familiaris
ttgtgcaaggtggtacgctcggtga

SEQ ID NO: 209753 - DNA, 25 bp, Canis familiaris
ttgtgtgaggtgttcccagagggaa

SEQ ID NO: 209754 - DNA, 25 bp, Canis familiaris
ttggggggacccatgatgggatcaa

SEQ ID NO: 209755 - DNA, 25 bp, Canis familiaris
ttggggggaaccccattgctggaag

SEQ ID NO: 209756 - DNA, 25 bp, Canis familiaris
ttggggtagacccctcattgtggcc

SEQ ID NO: 209757 - DNA, 25 bp, Canis familiaris
ttggggtccagatcctgattgttcc

SEQ ID NO: 209758 - DNA, 25 bp, Canis familiaris
ttggtggtcactaaacttttctgcc

SEQ ID NO: 209759 - DNA, 25 bp, Canis familiaris
ttggtggaccacaggtttggctctc

SEQ ID NO: 209760 - DNA, 25 bp, Canis familiaris
ttgggccactcacagggtgttgccc

SEQ ID NO: 209761 - DNA, 25 bp, Canis familiaris
ttggagccttactgggtattcctct

SEQ ID NO: 209762 - DNA, 25 bp, Canis familiaris
ttggaactttggtggtttgcctgtc

SEQ ID NO: 209763 - DNA, 25 bp, Canis familiaris
ttggaacgggagtggggtgcagcct

SEQ ID NO: 209764 - DNA, 25 bp, Canis familiaris
ttggtaagccggtagcgtggtggcc

SEQ ID NO: 209765 - DNA, 25 bp, Canis familiaris
ttgggaacacgtgctgggagggtct

SEQ ID NO: 209766 - DNA, 25 bp, Canis familiaris
ttgggacactcaggtctgggaggtc

SEQ ID NO: 209767 - DNA, 25 bp, Canis familiaris
ttgggccatgctcagtgctgaggga

SEQ ID NO: 209768 - DNA, 25 bp, Canis familiaris
ttggggcagctgcagtgttggccac

SEQ ID NO: 209769 - DNA, 25 bp, Canis familiaris
ttggcagccgatcagttgtgtgtcc

SEQ ID NO: 209770 - DNA, 25 bp, Canis familiaris
ttgtccacatgtcagttgtcatccc

SEQ ID NO: 209771 - DNA, 25 bp, Canis familiaris
ttgtccatcactatattgtacccct

SEQ ID NO: 209772 - DNA, 25 bp, Canis familiaris
ttgtccccaactttgtagcgtatct

SEQ ID NO: 209773 - DNA, 25 bp, Canis familiaris
ttgtcctccagtatttacggcatcc

SEQ ID NO: 209774 - DNA, 25 bp, Canis familiaris
ttgtcgccgcacttttataagtcat

SEQ ID NO: 209775 - DNA, 25 bp, Canis familiaris
ttgtccagcacacgtctttcaagga

SEQ ID NO: 209776 - DNA, 25 bp, Canis familiaris
ttgtcttgcacggtcatctgtgaag

SEQ ID NO: 209777 - DNA, 25 bp, Canis familiaris
ttgtgtgtacgaatgctcatgaaag

SEQ ID NO: 209778 - DNA, 25 bp, Canis familiaris
ttgggaagcaagactcagacacaga

SEQ ID NO: 209779 - DNA, 25 bp, Canis familiaris
ttgggccacaagacatggtgaaagc

SEQ ID NO: 209780 - DNA, 25 bp, Canis familiaris
ttggagctccaagcatcctaacacc

SEQ ID NO: 209781 - DNA, 25 bp, Canis familiaris
ttgtgagctcaagcccagtgaaccc

SEQ ID NO: 209782 - DNA, 25 bp, Canis familiaris
ttgtgattgaaggcccttaccgcac

SEQ ID NO: 209783 - DNA, 25 bp, Canis familiaris
ttgtgattgaagaccatttagtatg

SEQ ID NO: 209784 - DNA, 25 bp, Canis familiaris
ttgtcatatgaacccagttcctcac

SEQ ID NO: 209785 - DNA, 25 bp, Canis familiaris
ttggataggatcccagatcatccta

SEQ ID NO: 209786 - DNA, 25 bp, Canis familiaris
ttggaaggaccaagacatgcctacc

SEQ ID NO: 209787 - DNA, 25 bp, Canis familiaris
ttggaaggaccagacatcctacccc

SEQ ID NO: 209788 - DNA, 25 bp, Canis familiaris
ttggaaggaccagacatcctaccgc

SEQ ID NO: 209789 - DNA, 25 bp, Canis familiaris
ttggaaggaccagacatcctaccgc

SEQ ID NO: 209790 - DNA, 25 bp, Canis familiaris
ttggaaggaccagacatcctaccgc

SEQ ID NO: 209791 - DNA, 25 bp, Canis familiaris
ttggaaggaccagacatcctaccgc

SEQ ID NO: 209792 - DNA, 25 bp, Canis familiaris
ttggaaggaccagacatcctaccgc

SEQ ID NO: 209793 - DNA, 25 bp, Canis familiaris
ttggaaggaccagacatcctaccgc

SEQ ID NO: 209794 - DNA, 25 bp, Canis familiaris
ttggaagaaccagccataccagctt

SEQ ID NO: 209795 - DNA, 25 bp, Canis familiaris
ttggaataagtccccagacatccct

SEQ ID NO: 209796 - DNA, 25 bp, Canis familiaris
ttggaaaggtcgtttgcactcctct

SEQ ID NO: 209797 - DNA, 25 bp, Canis familiaris
ttgggaagcttcttttggcccatca

SEQ ID NO: 209798 - DNA, 25 bp, Canis familiaris
ttgggaagtacatgctgttcaccat

SEQ ID NO: 209799 - DNA, 25 bp, Canis familiaris
ttgggccagctaaacatgcttcatc

SEQ ID NO: 209800 - DNA, 25 bp, Canis familiaris
ttggagccagatttagccttctctc

SEQ ID NO: 209801 - DNA, 25 bp, Canis familiaris
ttggatcgaacattgaacatttcat

SEQ ID NO: 209802 - DNA, 25 bp, Canis familiaris
ttggaagtacattgcaagaaccatg

SEQ ID NO: 209803 - DNA, 25 bp, Canis familiaris
ttggcacagttcttaaatagcagca

SEQ ID NO: 209804 - DNA, 25 bp, Canis familiaris
ttggaactatgactaagacatcaga

SEQ ID NO: 209805 - DNA, 25 bp, Canis familiaris
ttggagcagctaactcacacacata

SEQ ID NO: 209806 - DNA, 25 bp, Canis familiaris
ttggcaagcgcaacacaaccatgga

SEQ ID NO: 209807 - DNA, 25 bp, Canis familiaris
ttggatctgctgcccaaaccagggc

SEQ ID NO: 209808 - DNA, 25 bp, Canis familiaris
ttggatcctgcactgatgaggccag

SEQ ID NO: 209809 - DNA, 25 bp, Canis familiaris
ttgatatcgtgctgatgctgtccgt

SEQ ID NO: 209810 - DNA, 25 bp, Canis familiaris
ttgtgcactgtgtgcatctgtccct

SEQ ID NO: 209811 - DNA, 25 bp, Canis familiaris
ttggcagcattgtgtctttcatctt

SEQ ID NO: 209812 - DNA, 25 bp, Canis familiaris
ttggatgcactgtgtctctttcaga

SEQ ID NO: 209813 - DNA, 25 bp, Canis familiaris
ttggatagcatttctctcttccatc

SEQ ID NO: 209814 - DNA, 25 bp, Canis familiaris
ttggtatgtgattctctcttgtgct

SEQ ID NO: 209815 - DNA, 25 bp, Canis familiaris
ttggatatggcttgcccatttctcg

SEQ ID NO: 209816 - DNA, 25 bp, Canis familiaris
ttggaactctatgccagtgatcctg

SEQ ID NO: 209817 - DNA, 25 bp, Canis familiaris
ttggaactcctgtagcttgatgcct

SEQ ID NO: 209818 - DNA, 25 bp, Canis familiaris
ttggcagaccttcatcttctgcctc

SEQ ID NO: 209819 - DNA, 25 bp, Canis familiaris
ttgtatgaaactcatctcctcctca

SEQ ID NO: 209820 - DNA, 25 bp, Canis familiaris
ttgttaagcttgcattcctgctcac

SEQ ID NO: 209821 - DNA, 25 bp, Canis familiaris
ttgttgataatgggttctctggcac

SEQ ID NO: 209822 - DNA, 25 bp, Canis familiaris
ttggctgtaagcagcttctctgtca

SEQ ID NO: 209823 - DNA, 25 bp, Canis familiaris
ttggctctgtagggttctctggaga

SEQ ID NO: 209824 - DNA, 25 bp, Canis familiaris
ttgggctgtggagggtcatctggat

SEQ ID NO: 209825 - DNA, 25 bp, Canis familiaris
ttggagtgctggagactttggatcg

SEQ ID NO: 209826 - DNA, 25 bp, Canis familiaris
ttggagtggttgttctttgtgtcgc

SEQ ID NO: 209827 - DNA, 25 bp, Canis familiaris
ttgtggattttggtttgggatccca

SEQ ID NO: 209828 - DNA, 25 bp, Canis familiaris
ttgtgactttggttttgtggatccc

SEQ ID NO: 209829 - DNA, 25 bp, Canis familiaris
ttgtgacatgttttttttgtcccca

SEQ ID NO: 209830 - DNA, 25 bp, Canis familiaris
ttgtttgtttttggtttctcacaca

SEQ ID NO: 209831 - DNA, 25 bp, Canis familiaris
ttgttttgttttgttttcacatttg

SEQ ID NO: 209832 - DNA, 25 bp, Canis familiaris
ttgtgttggctaattccttttcctt

SEQ ID NO: 209833 - DNA, 25 bp, Canis familiaris
ttgatttggggtccctattctgttt

SEQ ID NO: 209834 - DNA, 25 bp, Canis familiaris
ttggatttaggtccctttggctatt

SEQ ID NO: 209835 - DNA, 25 bp, Canis familiaris
ttgggattaagccccacatctggct

SEQ ID NO: 209836 - DNA, 25 bp, Canis familiaris
ttgggagtcaagttgccacattcca

SEQ ID NO: 209837 - DNA, 25 bp, Canis familiaris
ttgggagttgaaatgcctagtctaa

SEQ ID NO: 209838 - DNA, 25 bp, Canis familiaris
ttggtggagcgatttgtctggttaa

SEQ ID NO: 209839 - DNA, 25 bp, Canis familiaris
ttgggggggttcttgtgtctagatc

SEQ ID NO: 209840 - DNA, 25 bp, Canis familiaris
ttggagggggtgcttggttcatcat

SEQ ID NO: 209841 - DNA, 25 bp, Canis familiaris
ttggagccggaggcacttgttttta

SEQ ID NO: 209842 - DNA, 25 bp, Canis familiaris
ttggagccctgaggacttctttgca

SEQ ID NO: 209843 - DNA, 25 bp, Canis familiaris
ttgggagctctgagagcttctgttc

SEQ ID NO: 209844 - DNA, 25 bp, Canis familiaris
ttgggagctctgagacttctttctt

SEQ ID NO: 209845 - DNA, 25 bp, Canis familiaris
ttggtggcatcgattcttcttacta

SEQ ID NO: 209846 - DNA, 25 bp, Canis familiaris
ttggtccatgtgattctcatcctga

SEQ ID NO: 209847 - DNA, 25 bp, Canis familiaris
ttgtctgccagaattgttcccatga

SEQ ID NO: 209848 - DNA, 25 bp, Canis familiaris
ttgtatccatgactggtattgccta

SEQ ID NO: 209849 - DNA, 25 bp, Canis familiaris
ttggatcacatcctggtgaacccag

SEQ ID NO: 209850 - DNA, 25 bp, Canis familiaris
ttggtcacccagggcagaggccaga

SEQ ID NO: 209851 - DNA, 25 bp, Canis familiaris
ttggctacacaaggacaggctccag

SEQ ID NO: 209852 - DNA, 25 bp, Canis familiaris
ttggctgcacaaaggcgaggcccag

SEQ ID NO: 209853 - DNA, 25 bp, Canis familiaris
ttggctgctccaagagtggggccgt

SEQ ID NO: 209854 - DNA, 25 bp, Canis familiaris
ttggctgctcaggcagggggttcct

SEQ ID NO: 209855 - DNA, 25 bp, Canis familiaris
ttggtgctagggccagggccatctc

SEQ ID NO: 209856 - DNA, 25 bp, Canis familiaris
ttggtgctacgacagacctcatcac

SEQ ID NO: 209857 - DNA, 25 bp, Canis familiaris
ttggtgtgaatgttagccccacccc

SEQ ID NO: 209858 - DNA, 25 bp, Canis familiaris
ttggatgtgaagtgaaggccctgcc

SEQ ID NO: 209859 - DNA, 25 bp, Canis familiaris
ttggatgtggagctgacgtccgtgg

SEQ ID NO: 209860 - DNA, 25 bp, Canis familiaris
ttggaggcgacacgatcttcgggaa

SEQ ID NO: 209861 - DNA, 25 bp, Canis familiaris
ttggctgccggaagtgctttgggaa

SEQ ID NO: 209862 - DNA, 25 bp, Canis familiaris
ttggtgacacagaaatggtggggaa

SEQ ID NO: 209863 - DNA, 25 bp, Canis familiaris
ttggtgaaaaacatgcttggtgaaa

SEQ ID NO: 209864 - DNA, 25 bp, Canis familiaris
ttgggaacaaggctgatctggagac

SEQ ID NO: 209865 - DNA, 25 bp, Canis familiaris
ttggagcagcaccggggattggacc

SEQ ID NO: 209866 - DNA, 25 bp, Canis familiaris
ttggaagccgagcggcttcgctcgc

SEQ ID NO: 209867 - DNA, 25 bp, Canis familiaris
ttggacacggtgtggttccagctca

SEQ ID NO: 209868 - DNA, 25 bp, Canis familiaris
ttggagccgggttggtacagcagtt

SEQ ID NO: 209869 - DNA, 25 bp, Canis familiaris
ttgggactgggttaatactcagact

SEQ ID NO: 209870 - DNA, 25 bp, Canis familiaris
ttgggacttgggtaacatctcgttc

SEQ ID NO: 209871 - DNA, 25 bp, Canis familiaris
ttgtggacgtggcagtagactccat

SEQ ID NO: 209872 - DNA, 25 bp, Canis familiaris
ttgtgacctggcccagtaatctcct

SEQ ID NO: 209873 - DNA, 25 bp, Canis familiaris
ttggatcctggggattgagcaccct

SEQ ID NO: 209874 - DNA, 25 bp, Canis familiaris
ttggtcctgggactcgaattcccaa

SEQ ID NO: 209875 - DNA, 25 bp, Canis familiaris
ttggccggggagccgaagtcgcaaa

SEQ ID NO: 209876 - DNA, 25 bp, Canis familiaris
ttggccggggtgtgatcttggagac

SEQ ID NO: 209877 - DNA, 25 bp, Canis familiaris
ttggctcaggttgtggtctagggtt

SEQ ID NO: 209878 - DNA, 25 bp, Canis familiaris
ttgggtggttgcgtgcgtgaaggtg

SEQ ID NO: 209879 - DNA, 25 bp, Canis familiaris
ttggaggtgcgggcgggaagggccg

SEQ ID NO: 209880 - DNA, 25 bp, Canis familiaris
ttgtacggatgtgcgggtcggacgg

SEQ ID NO: 209881 - DNA, 25 bp, Canis familiaris
ttggacggatgtgagggtttggcct

SEQ ID NO: 209882 - DNA, 25 bp, Canis familiaris
ttggattcgtgtgtggtggttgggc

SEQ ID NO: 209883 - DNA, 25 bp, Canis familiaris
ttgtgtgtggtgggggtagggaggc

SEQ ID NO: 209884 - DNA, 25 bp, Canis familiaris
ttgtgggtgctgtggtttaggggcc

SEQ ID NO: 209885 - DNA, 25 bp, Canis familiaris
ttggtgggctgcaggtcttgaggga

SEQ ID NO: 209886 - DNA, 25 bp, Canis familiaris
ttgtctgtgtctggagagtttgagg

SEQ ID NO: 209887 - DNA, 25 bp, Canis familiaris
ttgtctcggcaggcagagctttttg

SEQ ID NO: 209888 - DNA, 25 bp, Canis familiaris
ttgtcataaatggcaagattttcta

SEQ ID NO: 209889 - DNA, 25 bp, Canis familiaris
ttgtcatgaactcaggatacttcta

SEQ ID NO: 209890 - DNA, 25 bp, Canis familiaris
ttgtcagaagccaagaccacttcct

SEQ ID NO: 209891 - DNA, 25 bp, Canis familiaris
ttggcagaacgaacaccacattttg

SEQ ID NO: 209892 - DNA, 25 bp, Canis familiaris
ttggcaacacaaaccggatttctct

SEQ ID NO: 209893 - DNA, 25 bp, Canis familiaris
ttggggctcagacccaggatttctc

SEQ ID NO: 209894 - DNA, 25 bp, Canis familiaris
ttgtggtctcaggcagccaggtttg

SEQ ID NO: 209895 - DNA, 25 bp, Canis familiaris
ttgtcgtcacaatccagtgtttgga

SEQ ID NO: 209896 - DNA, 25 bp, Canis familiaris
ttggagtcacaagccatctgttggc

SEQ ID NO: 209897 - DNA, 25 bp, Canis familiaris
ttggcctcatcaaacccttaggctc

SEQ ID NO: 209898 - DNA, 25 bp, Canis familiaris
ttgtcctcaaaacttcttactcatc

SEQ ID NO: 209899 - DNA, 25 bp, Canis familiaris
ttgtcactcaacattctgtttcttc

SEQ ID NO: 209900 - DNA, 25 bp, Canis familiaris
ttgtacattactttcttttttcaga

SEQ ID NO: 209901 - DNA, 25 bp, Canis familiaris
ttgtccattttactgtttatgttaa

SEQ ID NO: 209902 - DNA, 25 bp, Canis familiaris
ttgtcctgtttcttatgttggttga

SEQ ID NO: 209903 - DNA, 25 bp, Canis familiaris
ttgtctgcttttctattctgtctag

SEQ ID NO: 209904 - DNA, 25 bp, Canis familiaris
ttgtctctatttttcatctatttaa

SEQ ID NO: 209905 - DNA, 25 bp, Canis familiaris
ttgtgtttgtgaaatctcttttata

SEQ ID NO: 209906 - DNA, 25 bp, Canis familiaris
ttgtgtgtttaggcctcatttcttt

SEQ ID NO: 209907 - DNA, 25 bp, Canis familiaris
ttgtgtttatagttcctttgctgga

SEQ ID NO: 209908 - DNA, 25 bp, Canis familiaris
ttgtgatctgtaagttctttgtgca

SEQ ID NO: 209909 - DNA, 25 bp, Canis familiaris
ttgtgtttgatagttcctgctgtga

SEQ ID NO: 209910 - DNA, 25 bp, Canis familiaris
ttgtcttttatgttccatcttgcac

SEQ ID NO: 209911 - DNA, 25 bp, Canis familiaris
ttggcgctttattatactcttgctc

SEQ ID NO: 209912 - DNA, 25 bp, Canis familiaris
ttgttctgtgtttaactttgcactt

SEQ ID NO: 209913 - DNA, 25 bp, Canis familiaris
ttgttcttgtttcgtcttatggttc

SEQ ID NO: 209914 - DNA, 25 bp, Canis familiaris
ttgtattttgtttctctttggtgcc

SEQ ID NO: 209915 - DNA, 25 bp, Canis familiaris
ttgtatgttttttttttctgctgga

SEQ ID NO: 209916 - DNA, 25 bp, Canis familiaris
ttgtgtggtttttttttctgcataa

SEQ ID NO: 209917 - DNA, 25 bp, Canis familiaris
ttgtataatttattttcttgcaaaa

SEQ ID NO: 209918 - DNA, 25 bp, Canis familiaris
ttggtacttcggttctcttaaatca

SEQ ID NO: 209919 - DNA, 25 bp, Canis familiaris
ttgtggaggctctgttcttataaaa

SEQ ID NO: 209920 - DNA, 25 bp, Canis familiaris
ttggagagcccaagcttcttcatat

SEQ ID NO: 209921 - DNA, 25 bp, Canis familiaris
ttggagtcactcatgcttttgtata

SEQ ID NO: 209922 - DNA, 25 bp, Canis familiaris
ttggcaacttgcgtttgtgtgtata

SEQ ID NO: 209923 - DNA, 25 bp, Canis familiaris
ttgggcatcttgcttgtgtgtgtgt

SEQ ID NO: 209924 - DNA, 25 bp, Canis familiaris
ttggtatgtagccctggtgctgtgt

SEQ ID NO: 209925 - DNA, 25 bp, Canis familiaris
ttgtggaaagctcctgtggctcagc

SEQ ID NO: 209926 - DNA, 25 bp, Canis familiaris
ttggtgaaagtgctgcaggccccag

SEQ ID NO: 209927 - DNA, 25 bp, Canis familiaris
ttggagaacacgagaggccccacaa

SEQ ID NO: 209928 - DNA, 25 bp, Canis familiaris
ttgtgaaaagctatgcgacccccac

SEQ ID NO: 209929 - DNA, 25 bp, Canis familiaris
ttgtgaccattgtggagaccccacc

SEQ ID NO: 209930 - DNA, 25 bp, Canis familiaris
ttgtgacactggtgtccatcctcca

SEQ ID NO: 209931 - DNA, 25 bp, Canis familiaris
ttgtaaatgtgcagtgcctcagccc

SEQ ID NO: 209932 - DNA, 25 bp, Canis familiaris
ttgtaagagtcttggcctagccacc

SEQ ID NO: 209933 - DNA, 25 bp, Canis familiaris
ttgtaacatgtttgtaatagccaca

SEQ ID NO: 209934 - DNA, 25 bp, Canis familiaris
ttggacctgtttgcacaagctcaaa

SEQ ID NO: 209935 - DNA, 25 bp, Canis familiaris
ttggcagccgttaccgagactgaga

SEQ ID NO: 209936 - DNA, 25 bp, Canis familiaris
ttggatccgcatatgaagagactag

SEQ ID NO: 209937 - DNA, 25 bp, Canis familiaris
ttggagctccagagactgagacatc

SEQ ID NO: 209938 - DNA, 25 bp, Canis familiaris
ttggagttcaatacatctatgcaat

SEQ ID NO: 209939 - DNA, 25 bp, Canis familiaris
ttgggctgtctctatactatgaacc

SEQ ID NO: 209940 - DNA, 25 bp, Canis familiaris
ttggggtctctatttgtcaaccccg

SEQ ID NO: 209941 - DNA, 25 bp, Canis familiaris
ttgggccatcttttatgtaagacag

SEQ ID NO: 209942 - DNA, 25 bp, Canis familiaris
ttgggcttcttgctcagtagggagc

SEQ ID NO: 209943 - DNA, 25 bp, Canis familiaris
ttggatcgtcagtttcagttggggc

SEQ ID NO: 209944 - DNA, 25 bp, Canis familiaris
ttggtcttcatcttccagtttggaa

SEQ ID NO: 209945 - DNA, 25 bp, Canis familiaris
ttgtgtgccccattcttatttggaa

SEQ ID NO: 209946 - DNA, 25 bp, Canis familiaris
ttgtgttctccttcttacatgtaaa

SEQ ID NO: 209947 - DNA, 25 bp, Canis familiaris
ttgtctttctctgttaattcactca

SEQ ID NO: 209948 - DNA, 25 bp, Canis familiaris
ttgtatttctgctgtgttattcgta

SEQ ID NO: 209949 - DNA, 25 bp, Canis familiaris
ttgtattccctgttgtttatagata

SEQ ID NO: 209950 - DNA, 25 bp, Canis familiaris
ttgtattttcagtattttctacata

SEQ ID NO: 209951 - DNA, 25 bp, Canis familiaris
ttgttttctgcaaattttctagtac

SEQ ID NO: 209952 - DNA, 25 bp, Canis familiaris
ttgttttctcattttctactagtag

SEQ ID NO: 209953 - DNA, 25 bp, Canis familiaris
ttgtttgatacttttctgtctagac

SEQ ID NO: 209954 - DNA, 25 bp, Canis familiaris
ttgtgtgttacgtttatctctcaga

SEQ ID NO: 209955 - DNA, 25 bp, Canis familiaris
ttgtgtgtatttttgttctgctaag

SEQ ID NO: 209956 - DNA, 25 bp, Canis familiaris
ttggtttctcagttgtctctcaaag

SEQ ID NO: 209957 - DNA, 25 bp, Canis familiaris
ttggttttcagcagcatcttacacc

SEQ ID NO: 209958 - DNA, 25 bp, Canis familiaris
ttggttcttgccaacatctggctcc

SEQ ID NO: 209959 - DNA, 25 bp, Canis familiaris
ttggtctgttgtcagcttgagctgc

SEQ ID NO: 209960 - DNA, 25 bp, Canis familiaris
ttggcttgtctcctgagtaaggccc

SEQ ID NO: 209961 - DNA, 25 bp, Canis familiaris
ttggtttctaggcctggggcctgcc

SEQ ID NO: 209962 - DNA, 25 bp, Canis familiaris
ttggttttaacctttgtgtgctgcc

SEQ ID NO: 209963 - DNA, 25 bp, Canis familiaris
ttggcttttacagctttcttccaca

SEQ ID NO: 209964 - DNA, 25 bp, Canis familiaris
ttgggtataacaacttctctcccct

SEQ ID NO: 209965 - DNA, 25 bp, Canis familiaris
ttggatttctaaatcttcaccccac

SEQ ID NO: 209966 - DNA, 25 bp, Canis familiaris
ttggatctttaattattggccccct

SEQ ID NO: 209967 - DNA, 25 bp, Canis familiaris
ttgtgagtttattttctgtgccctg

SEQ ID NO: 209968 - DNA, 25 bp, Canis familiaris
ttgtgaagcttttcttggtccactt

SEQ ID NO: 209969 - DNA, 25 bp, Canis familiaris
ttggtagttatgttttctcgccttg

SEQ ID NO: 209970 - DNA, 25 bp, Canis familiaris
ttgtgtgatttttatttctgccccg

SEQ ID NO: 209971 - DNA, 25 bp, Canis familiaris
ttgtttttaaatctctcttccgtat

SEQ ID NO: 209972 - DNA, 25 bp, Canis familiaris
ttgtttttggaacctgctgttgcgc

SEQ ID NO: 209973 - DNA, 25 bp, Canis familiaris
ttgtttcttaaactagcattatcag

SEQ ID NO: 209974 - DNA, 25 bp, Canis familiaris
ttggcttcctaaaatggttatgctg

SEQ ID NO: 209975 - DNA, 25 bp, Canis familiaris
ttggcctctgtaacctggtatttgt

SEQ ID NO: 209976 - DNA, 25 bp, Canis familiaris
ttgtgcactctgtaacatcttggtt

SEQ ID NO: 209977 - DNA, 25 bp, Canis familiaris
ttgtggctgttaagcacctggtgct

SEQ ID NO: 209978 - DNA, 25 bp, Canis familiaris
ttgtggcctgtttgctttgagtgct

SEQ ID NO: 209979 - DNA, 25 bp, Canis familiaris
ttgtgtcttttgtctttgtgtgtgt

SEQ ID NO: 209980 - DNA, 25 bp, Canis familiaris
ttgtgtttgtctgtgttgtttgtta

SEQ ID NO: 209981 - DNA, 25 bp, Canis familiaris
ttggttttttgttgtgcttctttag

SEQ ID NO: 209982 - DNA, 25 bp, Canis familiaris
ttgtttctttttttgtgtcttatgt

SEQ ID NO: 209983 - DNA, 25 bp, Canis familiaris
ttgtttgcttctttttgtttccagt

SEQ ID NO: 209984 - DNA, 25 bp, Canis familiaris
ttgtggtcttttgtggtttccatta

SEQ ID NO: 209985 - DNA, 25 bp, Canis familiaris
ttgggcattttttctggcaattcct

SEQ ID NO: 209986 - DNA, 25 bp, Canis familiaris
ttgggctttttactgtctttgacat

SEQ ID NO: 209987 - DNA, 25 bp, Canis familiaris
ttggagctggtttttggccttgact

SEQ ID NO: 209988 - DNA, 25 bp, Canis familiaris
ttgggtggttttttgcagctttttg

SEQ ID NO: 209989 - DNA, 25 bp, Canis familiaris
ttgggttggggttatgggtctgttg

SEQ ID NO: 209990 - DNA, 25 bp, Canis familiaris
ttgggttgggtgggtatattttgtg

SEQ ID NO: 209991 - DNA, 25 bp, Canis familiaris
ttggctttgttagggttgactttgt

SEQ ID NO: 209992 - DNA, 25 bp, Canis familiaris
ttggcttcttttgtttaccattact

SEQ ID NO: 209993 - DNA, 25 bp, Canis familiaris
ttggcttttttgcttgtttaataca

SEQ ID NO: 209994 - DNA, 25 bp, Canis familiaris
ttggtttcctatatctttttaatca

SEQ ID NO: 209995 - DNA, 25 bp, Canis familiaris
ttgttttctgttctccttttattag

SEQ ID NO: 209996 - DNA, 25 bp, Canis familiaris
ttgtttctcggtctcagttttcata

SEQ ID NO: 209997 - DNA, 25 bp, Canis familiaris
ttggtttctggcttaatggtttcta

SEQ ID NO: 209998 - DNA, 25 bp, Canis familiaris
ttggtttcttgccacagggtttgaa

SEQ ID NO: 209999 - DNA, 25 bp, Canis familiaris
ttggttttgggcaacaggtcctgaa

SEQ ID NO: 210000 - DNA, 25 bp, Canis familiaris
ttggttttcggaactgaggccatga

SEQ ID NO: 210001 - DNA, 25 bp, Canis familiaris
ttggttttctggtttgagtctatca

SEQ ID NO: 210002 - DNA, 25 bp, Canis familiaris
ttgtgtttttgttcttactttcaat

SEQ ID NO: 210003 - DNA, 25 bp, Canis familiaris
ttgtatttttgatgttacattttat

SEQ ID NO: 210004 - DNA, 25 bp, Canis familiaris
ttgtatttaattctctcacttttga

SEQ ID NO: 210005 - DNA, 25 bp, Canis familiaris
ttgttttattcaccacatcacttct

SEQ ID NO: 210006 - DNA, 25 bp, Canis familiaris
ttgtttttatcatcatcctcttcat

SEQ ID NO: 210007 - DNA, 25 bp, Canis familiaris
ttgtttatcttctacagcttctgtc

SEQ ID NO: 210008 - DNA, 25 bp, Canis familiaris
ttgtttctttcaaggcttctttctg

SEQ ID NO: 210009 - DNA, 25 bp, Canis familiaris
ttgtattctcccttgagctttttct

SEQ ID NO: 210010 - DNA, 25 bp, Canis familiaris
ttgtctactcctttactgttatctt

SEQ ID NO: 210011 - DNA, 25 bp, Canis familiaris
ttgtgtacatcagtttctctggtat

SEQ ID NO: 210012 - DNA, 25 bp, Canis familiaris
ttggtacagcagttctcttggaatc

SEQ ID NO: 210013 - DNA, 25 bp, Canis familiaris
ttggtaaggactcctacgacaccac

SEQ ID NO: 210014 - DNA, 25 bp, Canis familiaris
ttgtggaaggaggccgcatcgacca

SEQ ID NO: 210015 - DNA, 25 bp, Canis familiaris
ttggtggagccaggcaggcactgac

SEQ ID NO: 210016 - DNA, 25 bp, Canis familiaris
ttggagtactgagcagccagctgca

SEQ ID NO: 210017 - DNA, 25 bp, Canis familiaris
ttggagaactgctcagtcagccttc

SEQ ID NO: 210018 - DNA, 25 bp, Canis familiaris
ttggcaggactgagagccatccctc

SEQ ID NO: 210019 - DNA, 25 bp, Canis familiaris
ttggcagggcagtgacttgcccctt

SEQ ID NO: 210020 - DNA, 25 bp, Canis familiaris
ttgtgcaggaagtaactctccccac

SEQ ID NO: 210021 - DNA, 25 bp, Canis familiaris
ttggcagtaggtttctctctcctac

SEQ ID NO: 210022 - DNA, 25 bp, Canis familiaris
ttggatgtcaagatcccacggctac

SEQ ID NO: 210023 - DNA, 25 bp, Canis familiaris
ttgtgttcacagactcggaaggtaa

SEQ ID NO: 210024 - DNA, 25 bp, Canis familiaris
ttggctccaagttcaaggaggtcaa

SEQ ID NO: 210025 - DNA, 25 bp, Canis familiaris
ttggctcctggcttcagatgtgagg

SEQ ID NO: 210026 - DNA, 25 bp, Canis familiaris
ttggccctggcaaatggctagcctc

SEQ ID NO: 210027 - DNA, 25 bp, Canis familiaris
ttggtcgtggacgtggtcagccacc

SEQ ID NO: 210028 - DNA, 25 bp, Canis familiaris
ttggtcgtgcgcaggggcaacagac

SEQ ID NO: 210029 - DNA, 25 bp, Canis familiaris
ttggctcagggcatggtcccagaga

SEQ ID NO: 210030 - DNA, 25 bp, Canis familiaris
ttggccagggcgcgatcctggagac

SEQ ID NO: 210031 - DNA, 25 bp, Canis familiaris
ttggcgctagctggggaactgggca

SEQ ID NO: 210032 - DNA, 25 bp, Canis familiaris
ttgggggctcgggaatctgtgccct

SEQ ID NO: 210033 - DNA, 25 bp, Canis familiaris
ttgtgtgggccacggaatggtccct

SEQ ID NO: 210034 - DNA, 25 bp, Canis familiaris
ttgtgggccgagcagagggctccac

SEQ ID NO: 210035 - DNA, 25 bp, Canis familiaris
ttggaggcatcttgggggagcccag

SEQ ID NO: 210036 - DNA, 25 bp, Canis familiaris
ttgtgcagagtctgggggtgccacc

SEQ ID NO: 210037 - DNA, 25 bp, Canis familiaris
ttgtaggtcactgcagggagcctcc

SEQ ID NO: 210038 - DNA, 25 bp, Canis familiaris
ttgtctgagctgctccaggaacctc

SEQ ID NO: 210039 - DNA, 25 bp, Canis familiaris
ttgtgtagctgagccaaacccctaa

SEQ ID NO: 210040 - DNA, 25 bp, Canis familiaris
ttgtaaggaactcagccacccaaga

SEQ ID NO: 210041 - DNA, 25 bp, Canis familiaris
ttgtaacggttcagcaacccaaagg

SEQ ID NO: 210042 - DNA, 25 bp, Canis familiaris
ttgtaatcggtaaactacttgaaag

SEQ ID NO: 210043 - DNA, 25 bp, Canis familiaris
ttggaacccataatactacttgtaa

SEQ ID NO: 210044 - DNA, 25 bp, Canis familiaris
ttggaatctcatatctactcacttt

SEQ ID NO: 210045 - DNA, 25 bp, Canis familiaris
ttggaagtctatagtcccatcctta

SEQ ID NO: 210046 - DNA, 25 bp, Canis familiaris
ttggacgtctataggatcgccgcac

SEQ ID NO: 210047 - DNA, 25 bp, Canis familiaris
ttgtgaggctctctggatagccccc

SEQ ID NO: 210048 - DNA, 25 bp, Canis familiaris
ttgtgcggcgctctcgaatgcacaa

SEQ ID NO: 210049 - DNA, 25 bp, Canis familiaris
ttggcgagctgtctgctactagcaa

SEQ ID NO: 210050 - DNA, 25 bp, Canis familiaris
ttggcagacagctcttcactcagag

SEQ ID NO: 210051 - DNA, 25 bp, Canis familiaris
ttgtcaagcgacgtgtaccaggcct

SEQ ID NO: 210052 - DNA, 25 bp, Canis familiaris
ttggcaacgagcggttccgatgccc

SEQ ID NO: 210053 - DNA, 25 bp, Canis familiaris
ttggcaaagctgggtcccttgtgcc

SEQ ID NO: 210054 - DNA, 25 bp, Canis familiaris
ttgggaagatggctccctggggcat

SEQ ID NO: 210055 - DNA, 25 bp, Canis familiaris
ttgggggatggcatcggctgtgagc

SEQ ID NO: 210056 - DNA, 25 bp, Canis familiaris
ttggggcttgatctcatgactgtga

SEQ ID NO: 210057 - DNA, 25 bp, Canis familiaris
ttgggtgttgtggacatggctgctg

SEQ ID NO: 210058 - DNA, 25 bp, Canis familiaris
ttgggtcctgctggagattctgcga

SEQ ID NO: 210059 - DNA, 25 bp, Canis familiaris
ttgggccgtgtggagatctgtctca

SEQ ID NO: 210060 - DNA, 25 bp, Canis familiaris
ttggtgccctggaagctgtatctga

SEQ ID NO: 210061 - DNA, 25 bp, Canis familiaris
ttgtgtcccttgtcagctgtaatga

SEQ ID NO: 210062 - DNA, 25 bp, Canis familiaris
ttggacgccattgagcttgaagacc

SEQ ID NO: 210063 - DNA, 25 bp, Canis familiaris
ttggacaactgtccctttcatgacc

SEQ ID NO: 210064 - DNA, 25 bp, Canis familiaris
ttggataagctctagacacggtgga

SEQ ID NO: 210065 - DNA, 25 bp, Canis familiaris
ttggataagtcccagagccgattcg

SEQ ID NO: 210066 - DNA, 25 bp, Canis familiaris
ttggccaagtcatcaagtccatccg

SEQ ID NO: 210067 - DNA, 25 bp, Canis familiaris
ttggccggtctaaagtctctcaata

SEQ ID NO: 210068 - DNA, 25 bp, Canis familiaris
ttgtccgagaccaaactctccaaca

SEQ ID NO: 210069 - DNA, 25 bp, Canis familiaris
ttgtccgaacggggtccatcaaaag

SEQ ID NO: 210070 - DNA, 25 bp, Canis familiaris
ttgtccgagccaatggggaaaaaag

SEQ ID NO: 210071 - DNA, 25 bp, Canis familiaris
ttgtccaacccttggggtgaagaag

SEQ ID NO: 210072 - DNA, 25 bp, Canis familiaris
ttggcaaacccccggggcaatggag

SEQ ID NO: 210073 - DNA, 25 bp, Canis familiaris
ttggagaaccctccggtggaaggcg

SEQ ID NO: 210074 - DNA, 25 bp, Canis familiaris
ttggggacgacatccctggaatgga

SEQ ID NO: 210075 - DNA, 25 bp, Canis familiaris
ttggtgtgaaactcggctgtattaa

SEQ ID NO: 210076 - DNA, 25 bp, Canis familiaris
ttgggagacaactgtgtgtgctttg

SEQ ID NO: 210077 - DNA, 25 bp, Canis familiaris
ttgggcaatctcaaagttggctttt

SEQ ID NO: 210078 - DNA, 25 bp, Canis familiaris
ttggggacccaaaatggctctattt

SEQ ID NO: 210079 - DNA, 25 bp, Canis familiaris
ttgggaacccaaaatcttatctctt

SEQ ID NO: 210080 - DNA, 25 bp, Canis familiaris
ttgtgtgttccctatttttatccat

SEQ ID NO: 210081 - DNA, 25 bp, Canis familiaris
ttgtcttttgctttttctttccagc

SEQ ID NO: 210082 - DNA, 25 bp, Canis familiaris
ttggttgtgacttttgttgttccgc

SEQ ID NO: 210083 - DNA, 25 bp, Canis familiaris
ttggctgttacttttgtttgcccac

SEQ ID NO: 210084 - DNA, 25 bp, Canis familiaris
ttggctcttaactttgtttgttact

SEQ ID NO: 210085 - DNA, 25 bp, Canis familiaris
ttggctcttactcatttgttttcct

SEQ ID NO: 210086 - DNA, 25 bp, Canis familiaris
ttggctctctatattttgatttctc

SEQ ID NO: 210087 - DNA, 25 bp, Canis familiaris
ttggctcttcagacaacttgatctt

SEQ ID NO: 210088 - DNA, 25 bp, Canis familiaris
ttgtctctgtaaaactttctgtcca

SEQ ID NO: 210089 - DNA, 25 bp, Canis familiaris
ttggctctgtgaaaacatgtttgtg

SEQ ID NO: 210090 - DNA, 25 bp, Canis familiaris
ttggctttgctgaacctatctagtg

SEQ ID NO: 210091 - DNA, 25 bp, Canis familiaris
ttggccttgcgaatcaccatcataa

SEQ ID NO: 210092 - DNA, 25 bp, Canis familiaris
ttgtgcccatcattatatcctctaa

SEQ ID NO: 210093 - DNA, 25 bp, Canis familiaris
ttggcccacagctaatgttccacac

SEQ ID NO: 210094 - DNA, 25 bp, Canis familiaris
ttggcctccagaggcttttccacag

SEQ ID NO: 210095 - DNA, 25 bp, Canis familiaris
ttgggatccgggttgtgtacatcag

SEQ ID NO: 210096 - DNA, 25 bp, Canis familiaris
ttgggagccggggtggtacatcagt

SEQ ID NO: 210097 - DNA, 25 bp, Canis familiaris
ttgggagccggggtggtacatcagt

SEQ ID NO: 210098 - DNA, 25 bp, Canis familiaris
ttgggagccggggtggtacatcagt

SEQ ID NO: 210099 - DNA, 25 bp, Canis familiaris
ttgggatgccggagggctacaccta

SEQ ID NO: 210100 - DNA, 25 bp, Canis familiaris
ttgggatccaataaggggagcacca

SEQ ID NO: 210101 - DNA, 25 bp, Canis familiaris
ttgtggatcccatagtggaatgcca

SEQ ID NO: 210102 - DNA, 25 bp, Canis familiaris
ttgtaacctcatcactggaatgttc

SEQ ID NO: 210103 - DNA, 25 bp, Canis familiaris
ttgtacacgctaacccaggattatc

SEQ ID NO: 210104 - DNA, 25 bp, Canis familiaris
ttgtccctgctggacctcagaatta

SEQ ID NO: 210105 - DNA, 25 bp, Canis familiaris
ttggccctgctaaaatagaatatag

SEQ ID NO: 210106 - DNA, 25 bp, Canis familiaris
ttggccaatgtaaggttaaatagta

SEQ ID NO: 210107 - DNA, 25 bp, Canis familiaris
ttggccaatccaacggtaaaatgaa

SEQ ID NO: 210108 - DNA, 553 bp, Canis familiaris; identical to SEQ ID NO: 1

SEQ ID NO: 210109 - DNA, 613 bp, Canis familiaris; identical to SEQ ID NO: 2

SEQ ID NO: 210110 - DNA, 596 bp, Canis familiaris; identical to SEQ ID NO: 3

SEQ ID NO: 210111 - DNA, 581 bp, Canis familiaris; identical to SEQ ID NO: 4

SEQ ID NO: 210112 - DNA, 606 bp, Canis familiaris; identical to SEQ ID NO: 5

SEQ ID NO: 210113 - DNA, 562 bp, Canis familiaris; identical to SEQ ID NO: 6

SEQ ID NO: 210114 - DNA, 585 bp, Canis familiaris; identical to SEQ ID NO: 7

SEQ ID NO: 210115 - DNA, 637 bp, Canis familiaris; identical to SEQ ID NO: 8

SEQ ID NO: 210116 - DNA, 761 bp, Canis familiaris; identical to SEQ ID NO: 9

SEQ ID NO: 210117 - DNA, 598 bp, Canis familiaris; identical to SEQ ID NO: 10

SEQ ID NO: 210118 - DNA, 595 bp, Canis familiaris; identical to SEQ ID NO: 11

SEQ ID NO: 210119 - DNA, 608 bp, Canis familiaris; identical to SEQ ID NO: 12
  misc_feature (202)..(202): n is a, c, g, or t

SEQ ID NO: 210120 - DNA, 600 bp, Canis familiaris; identical to SEQ ID NO: 13

SEQ ID NO: 210121 - DNA, 572 bp, Canis familiaris; identical to SEQ ID NO: 14

SEQ ID NO: 210122 - DNA, 573 bp, Canis familiaris; identical to SEQ ID NO: 15

SEQ ID NO: 210123 - DNA, 439 bp, Canis familiaris; identical to SEQ ID NO: 16

SEQ ID NO: 210124 - DNA, 600 bp, Canis familiaris; identical to SEQ ID NO: 17
  misc_feature (297)..(297): n is a, c, g, or t

SEQ ID NO: 210125 - DNA, 627 bp, Canis familiaris; identical to SEQ ID NO: 18

SEQ ID NO: 210126 - DNA, 523 bp, Canis familiaris; identical to SEQ ID NO: 19

SEQ ID NO: 210127 - DNA, 577 bp, Canis familiaris; identical to SEQ ID NO: 20

SEQ ID NO: 210128 - DNA, 584 bp, Canis familiaris; identical to SEQ ID NO: 21

SEQ ID NO: 210129 - DNA, 623 bp, Canis familiaris; identical to SEQ ID NO: 22

SEQ ID NO: 210130 - DNA, 518 bp, Canis familiaris; identical to SEQ ID NO: 23

SEQ ID NO: 210131 - DNA, 625 bp, Canis familiaris; identical to SEQ ID NO: 24

SEQ ID NO: 210132 - DNA, 596 bp, Canis familiaris; identical to SEQ ID NO: 25

SEQ ID NO: 210133 - DNA, 602 bp, Canis familiaris; identical to SEQ ID NO: 26

SEQ ID NO: 210134 - DNA, 538 bp, Canis familiaris; identical to SEQ ID NO: 27
  misc_feature (221)..(221): n is a, c, g, or t

SEQ ID NO: 210135 - DNA, 587 bp, Canis familiaris; identical to SEQ ID NO: 28
  misc_feature (246)..(246): n is a, c, g, or t

SEQ ID NO: 210136 - DNA, 629 bp, Canis familiaris; identical to SEQ ID NO: 29

SEQ ID NO: 210137 - DNA, 580 bp, Canis familiaris; identical to SEQ ID NO: 30

SEQ ID NO: 210138 - DNA, 692 bp, Canis familiaris; identical to SEQ ID NO: 31

SEQ ID NO: 210139 - DNA, 575 bp, Canis familiaris; identical to SEQ ID NO: 32

SEQ ID NO: 210140 - DNA, 459 bp, Canis familiaris; identical to SEQ ID NO: 33

SEQ ID NO: 210141 - DNA, 410 bp, Canis familiaris; identical to SEQ ID NO: 34

SEQ ID NO: 210142 - DNA, 646 bp, Canis familiaris; identical to SEQ ID NO: 35

SEQ ID NO: 210143 - DNA, 635 bp, Canis familiaris; identical to SEQ ID NO: 36
  misc_feature (139)..(139): n is a, c, g, or t

SEQ ID NO: 210144 - DNA, 594 bp, Canis familiaris; identical to SEQ ID NO: 37

SEQ ID NO: 210145 - DNA, 99 bp, Canis familiaris; identical to SEQ ID NO: 38

SEQ ID NO: 210146 - DNA, 658 bp, Canis familiaris; identical to SEQ ID NO: 39

SEQ ID NO: 210147 - DNA, 645 bp, Canis familiaris; identical to SEQ ID NO: 40

SEQ ID NO: 210148 - DNA, 597 bp, Canis familiaris; identical to SEQ ID NO: 41

SEQ ID NO: 210149 - DNA, 511 bp, Canis familiaris; identical to SEQ ID NO: 42

SEQ ID NO: 210150 - DNA, 513 bp, Canis familiaris; identical to SEQ ID NO: 43

SEQ ID NO: 210151 - DNA, 692 bp, Canis familiaris; identical to SEQ ID NO: 44

SEQ ID NO: 210152 - DNA, 582 bp, Canis familiaris; identical to SEQ ID NO: 45

SEQ ID NO: 210153 - DNA, 503 bp, Canis familiaris; identical to SEQ ID NO: 46

SEQ ID NO: 210154 - DNA, 602 bp, Canis familiaris; identical to SEQ ID NO: 47

SEQ ID NO: 210155 - DNA, 606 bp, Canis familiaris; identical to SEQ ID NO: 48
  misc_feature (463)..(463): n is a, c, g, or t

SEQ ID NO: 210156 - DNA, 455 bp, Canis familiaris; identical to SEQ ID NO: 49

SEQ ID NO: 210157 - DNA, 516 bp, Canis familiaris; identical to SEQ ID NO: 50

SEQ ID NO: 210158 - DNA, 603 bp, Canis familiaris; identical to SEQ ID NO: 51

SEQ ID NO: 210159 - DNA, 566 bp, Canis familiaris; identical to SEQ ID NO: 52

SEQ ID NO: 210160 - DNA, 579 bp, Canis familiaris; identical to SEQ ID NO: 53

SEQ ID NO: 210161 - DNA, 622 bp, Canis familiaris; identical to SEQ ID NO: 54
  misc_feature (89)..(89): n is a, c, g, or t

SEQ ID NO: 210162 - DNA, 665 bp, Canis familiaris; identical to SEQ ID NO: 55

SEQ ID NO: 210163 - DNA, 506 bp, Canis familiaris; identical to SEQ ID NO: 56

SEQ ID NO: 210164 - DNA, 520 bp, Canis familiaris; identical to SEQ ID NO: 57

SEQ ID NO: 210165 - DNA, 618 bp, Canis familiaris; identical to SEQ ID NO: 58

SEQ ID NO: 210166 - DNA, 537 bp, Canis familiaris; identical to SEQ ID NO: 59

SEQ ID NO: 210167 - DNA, 588 bp, Canis familiaris; identical to SEQ ID NO: 60

SEQ ID NO: 210168 - DNA, 665 bp, Canis familiaris; identical to SEQ ID NO: 61

SEQ ID NO: 210169 - DNA, 628 bp, Canis familiaris; identical to SEQ ID NO: 62

SEQ ID NO: 210170 - DNA, 607 bp, Canis familiaris; identical to SEQ ID NO: 63

SEQ ID NO: 210171 - DNA, 629 bp, Canis familiaris; identical to SEQ ID NO: 64

SEQ ID NO: 210172 - DNA, 558 bp, Canis familiaris; identical to SEQ ID NO: 65

SEQ ID NO: 210173 - DNA, 657 bp, Canis familiaris; identical to SEQ ID NO: 66

SEQ ID NO: 210174 - DNA, 630 bp, Canis familiaris; identical to SEQ ID NO: 67

SEQ ID NO: 210175 - DNA, 623 bp, Canis familiaris; identical to SEQ ID NO: 68

SEQ ID NO: 210176 - DNA, 615 bp, Canis familiaris; identical to SEQ ID NO: 69
  misc_feature (368)..(368): n is a, c, g, or t

SEQ ID NO: 210177 - DNA, 581 bp, Canis familiaris; identical to SEQ ID NO: 70

SEQ ID NO: 210178 - DNA, 630 bp, Canis familiaris; identical to SEQ ID NO: 71

SEQ ID NO: 210179 - DNA, 567 bp, Canis familiaris; identical to SEQ ID NO: 72

SEQ ID NO: 210180 - DNA, 651 bp, Canis familiaris; identical to SEQ ID NO: 73
  misc_feature (363)..(363): n is a, c, g, or t

SEQ ID NO: 210181 - DNA, 580 bp, Canis familiaris; identical to SEQ ID NO: 74

SEQ ID NO: 210182 - DNA, 469 bp, Canis familiaris; identical to SEQ ID NO: 75

SEQ ID NO: 210183 - DNA, 606 bp, Canis familiaris; identical to SEQ ID NO: 76

SEQ ID NO: 210184 - DNA, 551 bp, Canis familiaris; identical to SEQ ID NO: 77

SEQ ID NO: 210185 - DNA, 219 bp, Canis familiaris; identical to SEQ ID NO: 78

SEQ ID NO: 210186 - DNA, 517 bp, Canis familiaris; identical to SEQ ID NO: 79

SEQ ID NO: 210187 - DNA, 605 bp, Canis familiaris; identical to SEQ ID NO: 80

SEQ ID NO: 210188 - DNA, 599 bp, Canis familiaris; identical to SEQ ID NO: 81

SEQ ID NO: 210189 - DNA, 564 bp, Canis familiaris; identical to SEQ ID NO: 82

SEQ ID NO: 210190 - DNA, 570 bp, Canis familiaris; identical to SEQ ID NO: 83

SEQ ID NO: 210191 - DNA, 414 bp, Canis familiaris; identical to SEQ ID NO: 84

SEQ ID NO: 210192 - DNA, 629 bp, Canis familiaris; identical to SEQ ID NO: 85
  misc_feature (222)..(222): n is a, c, g, or t

SEQ ID NO: 210193 - DNA, 454 bp, Canis familiaris; identical to SEQ ID NO: 86

SEQ ID NO: 210194 - DNA, 398 bp, Canis familiaris; identical to SEQ ID NO: 87

SEQ ID NO: 210195 - DNA, 475 bp, Canis familiaris; identical to SEQ ID NO: 88
  misc_feature (226)..(226): n is a, c, g, or t

SEQ ID NO: 210196 - DNA, 405 bp, Canis familiaris; identical to SEQ ID NO: 89
  misc_feature (61)..(61): n is a, c, g, or t

SEQ ID NO: 210197 - DNA, 578 bp, Canis familiaris; identical to SEQ ID NO: 90

SEQ ID NO: 210198 - DNA, 624 bp, Canis familiaris; identical to SEQ ID NO: 91

SEQ ID NO: 210199 - DNA, 587 bp, Canis familiaris; identical to SEQ ID NO: 92
  misc_feature (47)..(47): n is a, c, g, or t

SEQ ID NO: 210200 - DNA, 250 bp, Canis familiaris; identical to SEQ ID NO: 93

SEQ ID NO: 210201 - DNA, 662 bp, Canis familiaris; identical to SEQ ID NO: 94

SEQ ID NO: 210202 - DNA, 558 bp, Canis familiaris; identical to SEQ ID NO: 95
  misc_feature (32)..(32): n is a, c, g, or t
  misc_feature (168)..(169): n is a, c, g, or t
  misc_feature (241)..(241): n is a, c, g, or t
  misc_feature (271)..(272): n is a, c, g, or t

SEQ ID NO: 210203 - DNA, 646 bp, Canis familiaris; identical to SEQ ID NO: 96

SEQ ID NO: 210204 - DNA, 562 bp, Canis familiaris; identical to SEQ ID NO: 97

SEQ ID NO: 210205 - DNA, 612 bp, Canis familiaris; identical to SEQ ID NO: 98

SEQ ID NO: 210206 - DNA, 572 bp, Canis familiaris; identical to SEQ ID NO: 99

SEQ ID NO: 210207 - DNA, 631 bp, Canis familiaris; identical to SEQ ID NO: 100

SEQ ID NO: 210208 - DNA, 510 bp, Canis familiaris; identical to SEQ ID NO: 101

SEQ ID NO: 210209 - DNA, 628 bp, Canis familiaris; identical to SEQ ID NO: 102

SEQ ID NO: 210210 - DNA, 659 bp, Canis familiaris; identical to SEQ ID NO: 103

SEQ ID NO: 210211 - DNA, 628 bp, Canis familiaris; identical to SEQ ID NO: 104

SEQ ID NO: 210212 - DNA, 336 bp, Canis familiaris; identical to SEQ ID NO: 105

SEQ ID NO: 210213 - DNA, 600 bp, Canis familiaris; identical to SEQ ID NO: 106

SEQ ID NO: 210214 - DNA, 155 bp, Canis familiaris; identical to SEQ ID NO: 107

SEQ ID NO: 210215 - DNA, 501 bp, Canis familiaris; identical to SEQ ID NO: 108

SEQ ID NO: 210216 - DNA, 569 bp, Canis familiaris; identical to SEQ ID NO: 109

SEQ ID NO: 210217 - DNA, 635 bp, Canis familiaris; identical to SEQ ID NO: 110
  misc_feature (486)..(487): n is a, c, g, or t

SEQ ID NO: 210218 - DNA, 483 bp, Canis familiaris; identical to SEQ ID NO: 111

SEQ ID NO: 210219 - DNA, 622 bp, Canis familiaris; identical to SEQ ID NO: 112
  misc_feature (18)..(18): n is a, c, g, or t

SEQ ID NO: 210220 - DNA, 674 bp, Canis familiaris; identical to SEQ ID NO: 113
  misc_feature (1)..(1): n is a, c, g, or t
  misc_feature (61)..(61): n is a, c, g, or t

SEQ ID NO: 210221 - DNA, 681 bp, Canis familiaris; identical to SEQ ID NO: 114
  misc_feature (529)..(529): n is a, c, g, or t
  misc_feature (571)..(571): n is a, c, g, or t

SEQ ID NO: 210222 - DNA, 610 bp, Canis familiaris; identical to SEQ ID NO: 115

SEQ ID NO: 210223 - DNA, 603 bp, Canis familiaris; identical to SEQ ID NO: 116

SEQ ID NO: 210224 - DNA, 677 bp, Canis familiaris; identical to SEQ ID NO: 117
  misc_feature (160)..(160): n is a, c, g, or t
  misc_feature (409)..(409): n is a, c, g, or t
  misc_feature (416)..(416): n is a, c, g, or t
  misc_feature (447)..(447): n is a, c, g, or t

SEQ ID NO: 210225 - DNA, 495 bp, Canis familiaris; identical to SEQ ID NO: 118

SEQ ID NO: 210226 - DNA, 628 bp, Canis familiaris; identical to SEQ ID NO: 119

SEQ ID NO: 210227 - DNA, 650 bp, Canis familiaris; identical to SEQ ID NO: 120
  misc_feature (494)..(494): n is a, c, g, or t

SEQ ID NO: 210228 - DNA, 675 bp, Canis familiaris; identical to SEQ ID NO: 121
  misc_feature (93)..(93): n is a, c, g, or t

SEQ ID NO: 210229 - DNA, 631 bp, Canis familiaris; identical to SEQ ID NO: 122

SEQ ID NO: 210230 - DNA, 586 bp, Canis familiaris; identical to SEQ ID NO: 123

SEQ ID NO: 210231 - DNA, 554 bp, Canis familiaris; identical to SEQ ID NO: 124

SEQ ID NO: 210232 - DNA, 554 bp, Canis familiaris; identical to SEQ ID NO: 125

SEQ ID NO: 210233 - DNA, 561 bp, Canis familiaris; identical to SEQ ID NO: 126

SEQ ID NO: 210234 - DNA, 655 bp, Canis familiaris; identical to SEQ ID NO: 127
  misc_feature (288)..(288): n is a, c, g, or t
  misc_feature (337)..(337): n is a, c, g, or t

SEQ ID NO: 210235 - DNA, 591 bp, Canis familiaris; identical to SEQ ID NO: 128

SEQ ID NO: 210236 - DNA, 558 bp, Canis familiaris; identical to SEQ ID NO: 129
  misc_feature (319)..(319): n is a, c, g, or t
  misc_feature (384)..(384): n is a, c, g, or t

SEQ ID NO: 210237 - DNA, 607 bp, Canis familiaris; identical to SEQ ID NO: 130

SEQ ID NO: 210238 - DNA, 632 bp, Canis familiaris; identical to SEQ ID NO: 131

SEQ ID NO: 210239 - DNA, 514 bp, Canis familiaris; identical to SEQ ID NO: 132
  misc_feature (71)..(71): n is a, c, g, or t
  misc_feature (130)..(130): n is a, c, g, or t
  misc_feature (137)..(137): n is a, c, g, or t
  misc_feature (149)..(149): n is a, c, g, or t

SEQ ID NO: 210240 - DNA, 683 bp, Canis familiaris; identical to SEQ ID NO: 133
  misc_feature (60)..(60): n is a, c, g, or t

SEQ ID NO: 210241 - DNA, 588 bp, Canis familiaris; identical to SEQ ID NO: 134
  misc_feature (506)..(506): n is a, c, g, or t

SEQ ID NO: 210242 - DNA, 658 bp, Canis familiaris; identical to SEQ ID NO: 135

SEQ ID NO: 210243 - DNA, 548 bp, Canis familiaris; identical to SEQ ID NO: 136

SEQ ID NO: 210244 - DNA, 643 bp, Canis familiaris; identical to SEQ ID NO: 137

SEQ ID NO: 210245 - DNA, 650 bp, Canis familiaris; identical to SEQ ID NO: 138

SEQ ID NO: 210246 - DNA, 643 bp, Canis familiaris; identical to SEQ ID NO: 139

SEQ ID NO: 210247 - DNA, 466 bp, Canis familiaris; identical to SEQ ID NO: 140

SEQ ID NO: 210248 - DNA, 634 bp, Canis familiaris; identical to SEQ ID NO: 141

SEQ ID NO: 210249 - DNA, 594 bp, Canis familiaris; identical to SEQ ID NO: 142

SEQ ID NO: 210250 - DNA, 608 bp, Canis familiaris; identical to SEQ ID NO: 143

SEQ ID NO: 210251 - DNA, 604 bp, Canis familiaris; identical to SEQ ID NO: 144

SEQ ID NO: 210252 - DNA, 599 bp, Canis familiaris; identical to SEQ ID NO: 145

SEQ ID NO: 210253 - DNA, 613 bp, Canis familiaris; identical to SEQ ID NO: 146

SEQ ID NO: 210254 - DNA, 575 bp, Canis familiaris; identical to SEQ ID NO: 147

SEQ ID NO: 210255 - DNA, 638 bp, Canis familiaris; identical to SEQ ID NO: 148

SEQ ID NO: 210256 - DNA, 685 bp, Canis familiaris; identical to SEQ ID NO: 149

SEQ ID NO: 210257 - DNA, 563 bp, Canis familiaris; identical to SEQ ID NO: 150

SEQ ID NO: 210258 - DNA, 657 bp, Canis familiaris; identical to SEQ ID NO: 151

SEQ ID NO: 210259 - DNA, 629 bp, Canis familiaris; identical to SEQ ID NO: 152

SEQ ID NO: 210260 - DNA, 633 bp, Canis familiaris; identical to SEQ ID NO: 153

SEQ ID NO: 210261 - DNA, 611 bp, Canis familiaris; identical to SEQ ID NO: 154
  misc_feature (328)..(328): n is a, c, g, or t
  misc_feature (529)..(529): n is a, c, g, or t
  misc_feature (536)..(536): n is a, c, g, or t
  misc_feature (542)..(542): n is a, c, g, or t

SEQ ID NO: 210262 - DNA, 603 bp, Canis familiaris; identical to SEQ ID NO: 155

SEQ ID NO: 210263 - DNA, 667 bp, Canis familiaris; identical to SEQ ID NO: 156
  misc_feature (255)..(255): n is a, c, g, or t

SEQ ID NO: 210264 - DNA, 530 bp, Canis familiaris; identical to SEQ ID NO: 157

SEQ ID NO: 210265 - DNA, 679 bp, Canis familiaris; identical to SEQ ID NO: 158

SEQ ID NO: 210266 - DNA, 679 bp, Canis familiaris; identical to SEQ ID NO: 159

SEQ ID NO: 210267 - DNA, 633 bp, Canis familiaris; identical to SEQ ID NO: 160

SEQ ID NO: 210268 - DNA, 636 bp, Canis familiaris; identical to SEQ ID NO: 161

SEQ ID NO: 210269 - DNA, 640 bp, Canis familiaris; identical to SEQ ID NO: 162
  misc_feature (59)..(59): n is a, c, g, or t

SEQ ID NO: 210270 - DNA, 651 bp, Canis familiaris; identical to SEQ ID NO: 163

SEQ ID NO: 210271 - DNA, 611 bp, Canis familiaris; identical to SEQ ID NO: 164

SEQ ID NO: 210272 - DNA, 603 bp, Canis familiaris; identical to SEQ ID NO: 165

SEQ ID NO: 210273 - DNA, 565 bp, Canis familiaris; identical to SEQ ID NO: 166

SEQ ID NO: 210274 - DNA, 620 bp, Canis familiaris; identical to SEQ ID NO: 167

SEQ ID NO: 210275 - DNA, 593 bp, Canis familiaris; identical to SEQ ID NO: 168
  misc_feature (126)..(126): n is a, c, g, or t

SEQ ID NO: 210276 - DNA, 300 bp, Canis familiaris; identical to SEQ ID NO: 169

SEQ ID NO: 210277 - DNA, 367 bp, Canis familiaris; identical to SEQ ID NO: 170

SEQ ID NO: 210278 - DNA, 646 bp, Canis familiaris; identical to SEQ ID NO: 171

SEQ ID NO: 210279 - DNA, 595 bp, Canis familiaris; identical to SEQ ID NO: 172

SEQ ID NO: 210280 - DNA, 573 bp, Canis familiaris; identical to SEQ ID NO: 173

SEQ ID NO: 210281 - DNA, 611 bp, Canis familiaris; identical to SEQ ID NO: 174

SEQ ID NO: 210282 - DNA, 474 bp, Canis familiaris; identical to SEQ ID NO: 175

SEQ ID NO: 210283 - DNA, 652 bp, Canis familiaris; identical to SEQ ID NO: 176

SEQ ID NO: 210284 - DNA, 579 bp, Canis familiaris; identical to SEQ ID NO: 177

SEQ ID NO: 210285 - DNA, 526 bp, Canis familiaris; identical to SEQ ID NO: 178

SEQ ID NO: 210286 - DNA, 623 bp, Canis familiaris; identical to SEQ ID NO: 179
  misc_feature (187)..(187): n is a, c, g, or t

SEQ ID NO: 210287 - DNA, 667 bp, Canis familiaris; identical to SEQ ID NO: 180

SEQ ID NO: 210288 - DNA, 526 bp, Canis familiaris; identical to SEQ ID NO: 181

SEQ ID NO: 210289 - DNA, 497 bp, Canis familiaris; identical to SEQ ID NO: 182

SEQ ID NO: 210290 - DNA, 655 bp, Canis familiaris; identical to SEQ ID NO: 183

SEQ ID NO: 210291 - DNA, 195 bp, Canis familiaris; identical to SEQ ID NO: 184

SEQ ID NO: 210292 - DNA, 581 bp, Canis familiaris; identical to SEQ ID NO: 185

SEQ ID NO: 210293 - DNA, 604 bp, Canis familiaris; identical to SEQ ID NO: 186

SEQ ID NO: 210294 - DNA, 644 bp, Canis familiaris; identical to SEQ ID NO: 187

SEQ ID NO: 210295 - DNA, 559 bp, Canis familiaris; identical to SEQ ID NO: 188

SEQ ID NO: 210296 - DNA, 639 bp, Canis familiaris; identical to SEQ ID NO: 189

SEQ ID NO: 210297 - DNA, 382 bp, Canis familiaris; identical to SEQ ID NO: 190

SEQ ID NO: 210298 - DNA, 606 bp, Canis familiaris; identical to SEQ ID NO: 191

SEQ ID NO: 210299 - DNA, 334 bp, Canis familiaris; identical to SEQ ID NO: 192

SEQ ID NO: 210300 - DNA, 608 bp, Canis familiaris; identical to SEQ ID NO: 193
  misc_feature (85)..(85): n is a, c, g, or t

SEQ ID NO: 210301 - DNA, 501 bp, Canis familiaris; identical to SEQ ID NO: 194
  misc_feature (218)..(218): n is a, c, g, or t

SEQ ID NO: 210302 - DNA, 537 bp, Canis familiaris; identical to SEQ ID NO: 195

SEQ ID NO: 210303 - DNA, 608 bp, Canis familiaris; identical to SEQ ID NO: 196

SEQ ID NO: 210304 - DNA, 693 bp, Canis familiaris; identical to SEQ ID NO: 197

SEQ ID NO: 210305 - DNA, 649 bp, Canis familiaris; identical to SEQ ID NO: 198

SEQ ID NO: 210306 - DNA, 401 bp, Canis familiaris; identical to SEQ ID NO: 199

SEQ ID NO: 210307 - DNA, 519 bp, Canis familiaris; identical to SEQ ID NO: 200

SEQ ID NO: 210308 - DNA, 591 bp, Canis familiaris; identical to SEQ ID NO: 201

SEQ ID NO: 210309 - DNA, 628 bp, Canis familiaris; identical to SEQ ID NO: 202

SEQ ID NO: 210310 - DNA, 587 bp, Canis familiaris; identical to SEQ ID NO: 203

SEQ ID NO: 210311 - DNA, 669 bp, Canis familiaris; identical to SEQ ID NO: 204
  misc_feature (60)..(60): n is a, c, g, or t

SEQ ID NO: 210312 - DNA, 496 bp, Canis familiaris; identical to SEQ ID NO: 205
  misc_feature (14)..(14): n is a, c, g, or t
  misc_feature (41)..(41): n is a, c, g, or t

SEQ ID NO: 210313 - DNA, 642 bp, Canis familiaris; identical to SEQ ID NO: 206
  misc_feature (44)..(44): n is a, c, g, or t

SEQ ID NO: 210314 - DNA, 518 bp, Canis familiaris; identical to SEQ ID NO: 207

SEQ ID NO: 210315 - DNA, 603 bp, Canis familiaris; identical to SEQ ID NO: 208

SEQ ID NO: 210316 - DNA, 607 bp, Canis familiaris; identical to SEQ ID NO: 209

SEQ ID NO: 210317 - DNA, 584 bp, Canis familiaris; identical to SEQ ID NO: 210
  misc_feature (267)..(267): n is a, c, g, or t

SEQ ID NO: 210318 - DNA, 726 bp, Canis familiaris; identical to SEQ ID NO: 211

SEQ ID NO: 210319 - DNA, 551 bp, Canis familiaris; identical to SEQ ID NO: 212

SEQ ID NO: 210320 - DNA, 601 bp, Canis familiaris; identical to SEQ ID NO: 213

SEQ ID NO: 210321 - DNA, 525 bp, Canis familiaris; identical to SEQ ID NO: 214

SEQ ID NO: 210322 - DNA, 544 bp, Canis familiaris; identical to SEQ ID NO: 215

SEQ ID NO: 210323 - DNA, 545 bp, Canis familiaris; identical to SEQ ID NO: 216

SEQ ID NO: 210324 - DNA, 682 bp, Canis familiaris; identical to SEQ ID NO: 217

SEQ ID NO: 210325 - DNA, 655 bp, Canis familiaris; identical to SEQ ID NO: 218

SEQ ID NO: 210326 - DNA, 780 bp, Canis familiaris; identical to SEQ ID NO: 219

SEQ ID NO: 210327 - DNA, 546 bp, Canis familiaris; identical to SEQ ID NO: 220

SEQ ID NO: 210328 - DNA, 552 bp, Canis familiaris; identical to SEQ ID NO: 221

SEQ ID NO: 210329 - DNA, 618 bp, Canis familiaris; identical to SEQ ID NO: 222

SEQ ID NO: 210330 - DNA, 614 bp, Canis familiaris; identical to SEQ ID NO: 223
  misc_feature (35)..(35): n is a, c, g, or t
  misc_feature (161)..(161): n is a, c, g, or t

SEQ ID NO: 210331 - DNA, 658 bp, Canis familiaris; identical to SEQ ID NO: 224

SEQ ID NO: 210332 - DNA, 649 bp, Canis familiaris; identical to SEQ ID NO: 225

SEQ ID NO: 210333 - DNA, 624 bp, Canis familiaris; identical to SEQ ID NO: 226
  misc_feature (120)..(120): n is a, c, g, or t

SEQ ID NO: 210334 - DNA, 461 bp, Canis familiaris; identical to SEQ ID NO: 227

SEQ ID NO: 210335 - DNA, 504 bp, Canis familiaris; identical to SEQ ID NO: 228

SEQ ID NO: 210336 - DNA, 603 bp, Canis familiaris; identical to SEQ ID NO: 229

SEQ ID NO: 210337 - DNA, 647 bp, Canis familiaris; identical to SEQ ID NO: 230

SEQ ID NO: 210338 - DNA, 643 bp, Canis familiaris; identical to SEQ ID NO: 231

SEQ ID NO: 210339 - DNA, 542 bp, Canis familiaris; identical to SEQ ID NO: 232

SEQ ID NO: 210340 - DNA, 551 bp, Canis familiaris; identical to SEQ ID NO: 233

SEQ ID NO: 210341 - DNA, 703 bp, Canis familiaris; identical to SEQ ID NO: 234

SEQ ID NO: 210342 - DNA, 676 bp, Canis familiaris; identical to SEQ ID NO: 235

SEQ ID NO: 210343 - DNA, 594 bp, Canis familiaris; identical to SEQ ID NO: 236

SEQ ID NO: 210344 - DNA, 607 bp, Canis familiaris; identical to SEQ ID NO: 237
  misc_feature (16)..(16): n is a, c, g, or t

SEQ ID NO: 210345 - DNA, 648 bp, Canis familiaris; identical to SEQ ID NO: 238

SEQ ID NO: 210346 - DNA, 685 bp, Canis familiaris; identical to SEQ ID NO: 239

SEQ ID NO: 210347 - DNA, 615 bp, Canis familiaris; identical to SEQ ID NO: 240

SEQ ID NO: 210348 - DNA, 638 bp, Canis familiaris; identical to SEQ ID NO: 241

SEQ ID NO: 210349 - DNA, 610 bp, Canis familiaris; identical to SEQ ID NO: 242

SEQ ID NO: 210350 - DNA, 649 bp, Canis familiaris; identical to SEQ ID NO: 243

SEQ ID NO: 210351 - DNA, 617 bp, Canis familiaris; identical to SEQ ID NO: 244

SEQ ID NO: 210352 - DNA, 702 bp, Canis familiaris; identical to SEQ ID NO: 245

SEQ ID NO: 210353 - DNA, 463 bp, Canis familiaris; identical to SEQ ID NO: 246

SEQ ID NO: 210354 - DNA, 640 bp, Canis familiaris; identical to SEQ ID NO: 247

SEQ ID NO: 210355 - DNA, 683 bp, Canis familiaris; identical to SEQ ID NO: 248

SEQ ID NO: 210356 - DNA, 556 bp, Canis familiaris; identical to SEQ ID NO: 249

SEQ ID NO: 210357 - DNA, 603 bp, Canis familiaris; identical to SEQ ID NO: 250

SEQ ID NO: 210358 - DNA, 577 bp, Canis familiaris; identical to SEQ ID NO: 251
  misc_feature (335)..(335): n is a, c, g, or t

SEQ ID NO: 210359 - DNA, 598 bp, Canis familiaris; identical to SEQ ID NO: 252

SEQ ID NO: 210360 - DNA, 568 bp, Canis familiaris; identical to SEQ ID NO: 253

SEQ ID NO: 210361 - DNA, 625 bp, Canis familiaris; identical to SEQ ID NO: 254

SEQ ID NO: 210362 - DNA, 584 bp, Canis familiaris; identical to SEQ ID NO: 255

SEQ ID NO: 210363 - DNA, 525 bp, Canis familiaris; identical to SEQ ID NO: 256

SEQ ID NO: 210364 - DNA, 691 bp, Canis familiaris; identical to SEQ ID NO: 257

SEQ ID NO: 210365 - DNA, 667 bp, Canis familiaris; identical to SEQ ID NO: 258

SEQ ID NO: 210366 - DNA, 576 bp, Canis familiaris; identical to SEQ ID NO: 259

SEQ ID NO: 210367 - DNA, 565 bp, Canis familiaris; identical to SEQ ID NO: 260

SEQ ID NO: 210368 - DNA, 503 bp, Canis familiaris; identical to SEQ ID NO: 261

SEQ ID NO: 210369 - DNA, 531 bp, Canis familiaris; identical to SEQ ID NO: 262

SEQ ID NO: 210370 - DNA, 601 bp, Canis familiaris; identical to SEQ ID NO: 263

SEQ ID NO: 210371 - DNA, 568 bp, Canis familiaris; identical to SEQ ID NO: 264

SEQ ID NO: 210372 - DNA, 569 bp, Canis familiaris; identical to SEQ ID NO: 265

SEQ ID NO: 210373 - DNA, 414 bp, Canis familiaris; identical to SEQ ID NO: 266

SEQ ID NO: 210374 - DNA, 673 bp, Canis familiaris; identical to SEQ ID NO: 267

SEQ ID NO: 210375 - DNA, 139 bp, Canis familiaris; identical to SEQ ID NO: 268

SEQ ID NO: 210376 - DNA, 598 bp, Canis familiaris; identical to SEQ ID NO: 269

SEQ ID NO: 210377 - DNA, 394 bp, Canis familiaris; identical to SEQ ID NO: 270

SEQ ID NO: 210378 - DNA, 611 bp, Canis familiaris; identical to SEQ ID NO: 271

SEQ ID NO: 210379 - DNA, 671 bp, Canis familiaris; identical to SEQ ID NO: 272

SEQ ID NO: 210380 - DNA, 558 bp, Canis familiaris; identical to SEQ ID NO: 273

SEQ ID NO: 210381 - DNA, 647 bp, Canis familiaris; identical to SEQ ID NO: 274

SEQ ID NO: 210382 - DNA, 497 bp, Canis familiaris; identical to SEQ ID NO: 275

SEQ ID NO: 210383 - DNA, 643 bp, Canis familiaris; identical to SEQ ID NO: 276

SEQ ID NO: 210384 - DNA, 533 bp, Canis familiaris; identical to SEQ ID NO: 277

SEQ ID NO: 210385 - DNA, 596 bp, Canis familiaris; identical to SEQ ID NO: 278

SEQ ID NO: 210386 - DNA, 565 bp, Canis familiaris; identical to SEQ ID NO: 279

SEQ ID NO: 210387 - DNA, 560 bp, Canis familiaris; identical to SEQ ID NO: 280

SEQ ID NO: 210388 - DNA, 597 bp, Canis familiaris; identical to SEQ ID NO: 281

SEQ ID NO: 210389 - DNA, 650 bp, Canis familiaris; identical to SEQ ID NO: 282

SEQ ID NO: 210390 - DNA, 557 bp, Canis familiaris; identical to SEQ ID NO: 283

SEQ ID NO: 210391 - DNA, 575 bp, Canis familiaris; identical to SEQ ID NO: 284

SEQ ID NO: 210392 - DNA, 607 bp, Canis familiaris; identical to SEQ ID NO: 285

SEQ ID NO: 210393 - DNA, 537 bp, Canis familiaris; identical to SEQ ID NO: 286

SEQ ID NO: 210394 - DNA, 617 bp, Canis familiaris; identical to SEQ ID NO: 287

SEQ ID NO: 210395 - DNA, 630 bp, Canis familiaris; identical to SEQ ID NO: 288

SEQ ID NO: 210396 - DNA, 657 bp, Canis familiaris; identical to SEQ ID NO: 289

SEQ ID NO: 210397 - DNA, 692 bp, Canis familiaris; identical to SEQ ID NO: 290

SEQ ID NO: 210398 - DNA, 596 bp, Canis familiaris; identical to SEQ ID NO: 291

SEQ ID NO: 210399 - DNA, 532 bp, Canis familiaris; identical to SEQ ID NO: 292

SEQ ID NO: 210400 - DNA, 622 bp, Canis familiaris; identical to SEQ ID NO: 293

SEQ ID NO: 210401 - DNA, 681 bp, Canis familiaris; identical to SEQ ID NO: 294

SEQ ID NO: 210402 - DNA, 566 bp, Canis familiaris; identical to SEQ ID NO: 295

SEQ ID NO: 210403 - DNA, 483 bp, Canis familiaris; identical to SEQ ID NO: 296

SEQ ID NO: 210404 - DNA, 590 bp, Canis familiaris; identical to SEQ ID NO: 297

SEQ ID NO: 210405 - DNA, 717 bp, Canis familiaris; identical to SEQ ID NO: 298

SEQ ID NO: 210406 - DNA, 535 bp, Canis familiaris; identical to SEQ ID NO: 299

SEQ ID NO: 210407 - DNA, 544 bp, Canis familiaris; identical to SEQ ID NO: 300

SEQ ID NO: 210408 - DNA, 678 bp, Canis familiaris; identical to SEQ ID NO: 301

SEQ ID NO: 210409 - DNA, 576 bp, Canis familiaris; identical to SEQ ID NO: 302

SEQ ID NO: 210410 - DNA, 661 bp, Canis familiaris; identical to SEQ ID NO: 303

SEQ ID NO: 210411 - DNA, 642 bp, Canis familiaris; identical to SEQ ID NO: 304

SEQ ID NO: 210412 - DNA, 635 bp, Canis familiaris; identical to SEQ ID NO: 305

SEQ ID NO: 210413 - DNA, 495 bp, Canis familiaris; identical to SEQ ID NO: 306

SEQ ID NO: 210414 - DNA, 570 bp, Canis familiaris; identical to SEQ ID NO: 307

SEQ ID NO: 210415 - DNA, 544 bp, Canis familiaris; identical to SEQ ID NO: 308

SEQ ID NO: 210416 - DNA, 597 bp, Canis familiaris; identical to SEQ ID NO: 309

SEQ ID NO: 210417 - DNA, 649 bp, Canis familiaris; identical to SEQ ID NO: 310

SEQ ID NO: 210418 - DNA, 579 bp, Canis familiaris; identical to SEQ ID NO: 311

SEQ ID NO: 210419 - DNA, 508 bp, Canis familiaris; identical to SEQ ID NO: 312

SEQ ID NO: 210420 - DNA, 625 bp, Canis familiaris; identical to SEQ ID NO: 313

SEQ ID NO: 210421 - DNA, 676 bp, Canis familiaris; identical to SEQ ID NO: 314

SEQ ID NO: 210422 - DNA, 564 bp, Canis familiaris; identical to SEQ ID NO: 315
  misc_feature (150)..(150): n is a, c, g, or t

SEQ ID NO: 210423 - DNA, 580 bp, Canis familiaris; identical to SEQ ID NO: 316

SEQ ID NO: 210424 - DNA, 462 bp, Canis familiaris; identical to SEQ ID NO: 317

SEQ ID NO: 210425 - DNA, 650 bp, Canis familiaris; identical to SEQ ID NO: 318

SEQ ID NO: 210426 - DNA, 516 bp, Canis familiaris; identical to SEQ ID NO: 319

SEQ ID NO: 210427 - DNA, 615 bp, Canis familiaris; identical to SEQ ID NO: 320

SEQ ID NO: 210428 - DNA, 630 bp, Canis familiaris; identical to SEQ ID NO: 321

SEQ ID NO: 210429 - DNA, 154 bp, Canis familiaris; identical to SEQ ID NO: 322

SEQ ID NO: 210430 - DNA, 594 bp, Canis familiaris; identical to SEQ ID NO: 323

SEQ ID NO: 210431 - DNA, 689 bp, Canis familiaris; identical to SEQ ID NO: 324

SEQ ID NO: 210432 - DNA, 676 bp, Canis familiaris; identical to SEQ ID NO: 325

SEQ ID NO: 210433 - DNA, 621 bp, Canis familiaris; identical to SEQ ID NO: 326

SEQ ID NO: 210434 - DNA, 574 bp, Canis familiaris; identical to SEQ ID NO: 327

SEQ ID NO: 210435 - DNA, 626 bp, Canis familiaris; identical to SEQ ID NO: 328

SEQ ID NO: 210436 - DNA, 639 bp, Canis familiaris; identical to SEQ ID NO: 329

SEQ ID NO: 210437 - DNA, 555 bp, Canis familiaris; identical to SEQ ID NO: 330

SEQ ID NO: 210438 - DNA, 688 bp, Canis familiaris; identical to SEQ ID NO: 331

SEQ ID NO: 210439 - DNA, 592 bp, Canis familiaris; identical to SEQ ID NO: 332

SEQ ID NO: 210440 - DNA, 597 bp, Canis familiaris; identical to SEQ ID NO: 333

SEQ ID NO: 210441 - DNA, 512 bp, Canis familiaris; identical to SEQ ID NO: 334

SEQ ID NO: 210442 - DNA, 606 bp, Canis familiaris; identical to SEQ ID NO: 335

SEQ ID NO: 210443 - DNA, 529 bp, Canis familiaris; identical to SEQ ID NO: 336

SEQ ID NO: 210444 - DNA, 236 bp, Canis familiaris; identical to SEQ ID NO: 337

SEQ ID NO: 210445 - DNA, 618 bp, Canis familiaris; identical to SEQ ID NO: 338

SEQ ID NO: 210446 - DNA, 605 bp, Canis familiaris; identical to SEQ ID NO: 339

SEQ ID NO: 210447 - DNA, 656 bp, Canis familiaris; identical to SEQ ID NO: 340

SEQ ID NO: 210448 - DNA, 471 bp, Canis familiaris; identical to SEQ ID NO: 341

SEQ ID NO: 210449 - DNA, 535 bp, Canis familiaris; identical to SEQ ID NO: 342
  misc_feature (125)..(125): n is a, c, g, or t

SEQ ID NO: 210450 - DNA, 631 bp, Canis familiaris; identical to SEQ ID NO: 343

SEQ ID NO: 210451 - DNA, 611 bp, Canis familiaris; identical to SEQ ID NO: 344

SEQ ID NO: 210452 - DNA, 491 bp, Canis familiaris; identical to SEQ ID NO: 345

SEQ ID NO: 210453 - DNA, 628 bp, Canis familiaris; identical to SEQ ID NO: 346
  misc_feature (301)..(301): n is a, c, g, or t

SEQ ID NO: 210454 - DNA, 617 bp, Canis familiaris; identical to SEQ ID NO: 347

SEQ ID NO: 210455 - DNA, 591 bp, Canis familiaris; identical to SEQ ID NO: 348

SEQ ID NO: 210456 - DNA, 247 bp, Canis familiaris; identical to SEQ ID NO: 349

SEQ ID NO: 210457 - DNA, 617 bp, Canis familiaris; identical to SEQ ID NO: 350

SEQ ID NO: 210458 - DNA, 280 bp, Canis familiaris; identical to SEQ ID NO: 351

SEQ ID NO: 210459 - DNA, 649 bp, Canis familiaris; identical to SEQ ID NO: 352

SEQ ID NO: 210460 - DNA, 568 bp, Canis familiaris; identical to SEQ ID NO: 353
  misc_feature (311)..(311): n is a, c, g, or t

SEQ ID NO: 210461 - DNA, 675 bp, Canis familiaris; identical to SEQ ID NO: 354
  misc_feature (84)..(84): n is a, c, g, or t

SEQ ID NO: 210462 - DNA, 547 bp, Canis familiaris; identical to SEQ ID NO: 355
  misc_feature (235)..(235): n is a, c, g, or t

SEQ ID NO: 210463 - DNA, 202 bp, Canis familiaris; identical to SEQ ID NO: 356

SEQ ID NO: 210464 - DNA, 603 bp, Canis familiaris; identical to SEQ ID NO: 357

SEQ ID NO: 210465 - DNA, 631 bp, Canis familiaris; identical to SEQ ID NO: 358

SEQ ID NO: 210466 - DNA, 597 bp, Canis familiaris; identical to SEQ ID NO: 359

SEQ ID NO: 210467 - DNA, 712 bp, Canis familiaris; identical to SEQ ID NO: 360

SEQ ID NO: 210468 - DNA, 640 bp, Canis familiaris; identical to SEQ ID NO: 361

SEQ ID NO: 210469 - DNA, 685 bp, Canis familiaris; identical to SEQ ID NO: 362

SEQ ID NO: 210470 - DNA, 589 bp, Canis familiaris; identical to SEQ ID NO: 363
  misc_feature (340)..(341): n is a, c, g, or t

SEQ ID NO: 210471 - DNA, 529 bp, Canis familiaris; identical to SEQ ID NO: 364
  misc_feature (355)..(355): n is a, c, g, or t

SEQ ID NO: 210472 - DNA, 557 bp, Canis familiaris; identical to SEQ ID NO: 365

SEQ ID NO: 210473 - DNA, 568 bp, Canis familiaris; identical to SEQ ID NO: 366

SEQ ID NO: 210474 - DNA, 673 bp, Canis familiaris; identical to SEQ ID NO: 367

SEQ ID NO: 210475 - DNA, 503 bp, Canis familiaris; identical to SEQ ID NO: 368

SEQ ID NO: 210476 - DNA, 136 bp, Canis familiaris; identical to SEQ ID NO: 369

SEQ ID NO: 210477 - DNA, 631 bp, Canis familiaris; identical to SEQ ID NO: 370

SEQ ID NO: 210478 - DNA, 655 bp, Canis familiaris; identical to SEQ ID NO: 371

SEQ ID NO: 210479 - DNA, 465 bp, Canis familiaris; identical to SEQ ID NO: 372
  misc_feature (20)..(21): n is a, c, g, or t

SEQ ID NO: 210480 - DNA, 639 bp, Canis familiaris; identical to SEQ ID NO: 373

SEQ ID NO: 210481 - DNA, 650 bp, Canis familiaris; identical to SEQ ID NO: 374
  misc_feature (164)..(164): n is a, c, g, or t

SEQ ID NO: 210482 - DNA, 592 bp, Canis familiaris; identical to SEQ ID NO: 375
  misc_feature (152)..(152): n is a, c, g, or t

SEQ ID NO: 210483 - DNA, 646 bp, Canis familiaris; identical to SEQ ID NO: 376

SEQ ID NO: 210484 - DNA, 640 bp, Canis familiaris; identical to SEQ ID NO: 377

SEQ ID NO: 210485 - DNA, 474 bp, Canis familiaris; identical to SEQ ID NO: 378

SEQ ID NO: 210486 - DNA, 535 bp, Canis familiaris; identical to SEQ ID NO: 379

SEQ ID NO: 210487 - DNA, 549 bp, Canis familiaris; identical to SEQ ID NO: 380

SEQ ID NO: 210488 - DNA, 515 bp, Canis familiaris; identical to SEQ ID NO: 381

SEQ ID NO: 210489 - DNA, 739 bp, Canis familiaris; identical to SEQ ID NO: 382
  misc_feature (160)..(160): n is a, c, g, or t

SEQ ID NO: 210490 - DNA, 555 bp, Canis familiaris; identical to SEQ ID NO: 383

SEQ ID NO: 210491 - DNA, 631 bp, Canis familiaris; identical to SEQ ID NO: 384

SEQ ID NO: 210492 - DNA, 559 bp, Canis familiaris; identical to SEQ ID NO: 385

SEQ ID NO: 210493 - DNA, 639 bp, Canis familiaris; identical to SEQ ID NO: 386

SEQ ID NO: 210494 - DNA, 597 bp, Canis familiaris; identical to SEQ ID NO: 387

SEQ ID NO: 210495 - DNA, 547 bp, Canis familiaris; identical to SEQ ID NO: 388

SEQ ID NO: 210496 - DNA, 582 bp, Canis familiaris; identical to SEQ ID NO: 389

SEQ ID NO: 210497 - DNA, 268 bp, Canis familiaris; identical to SEQ ID NO: 390

SEQ ID NO: 210498 - DNA, 619 bp, Canis familiaris; identical to SEQ ID NO: 391
  misc_feature (160)..(160): n is a, c, g, or t

SEQ ID NO: 210499 - DNA, 612 bp, Canis familiaris; identical to SEQ ID NO: 392

SEQ ID NO: 210500 - DNA, 560 bp, Canis familiaris; identical to SEQ ID NO: 393

SEQ ID NO: 210501 - DNA, 630 bp, Canis familiaris; identical to SEQ ID NO: 394

SEQ ID NO: 210502 - DNA, 665 bp, Canis familiaris; identical to SEQ ID NO: 395

SEQ ID NO: 210503 - DNA, 382 bp, Canis familiaris; identical to SEQ ID NO: 396

SEQ ID NO: 210504 - DNA, 544 bp, Canis familiaris; identical to SEQ ID NO: 397

SEQ ID NO: 210505 - DNA, 304 bp, Canis familiaris; identical to SEQ ID NO: 398

SEQ ID NO: 210506 - DNA, 631 bp, Canis familiaris; identical to SEQ ID NO: 399

SEQ ID NO: 210507 - DNA, 584 bp, Canis familiaris; identical to SEQ ID NO: 400
  misc_feature (128)..(128): n is a, c, g, or t

SEQ ID NO: 210508 - DNA, 451 bp, Canis familiaris; identical to SEQ ID NO: 401
  misc_feature (69)..(69): n is a, c, g, or t

SEQ ID NO: 210509 - DNA, 613 bp, Canis familiaris; identical to SEQ ID NO: 402

SEQ ID NO: 210510 - DNA, 336 bp, Canis familiaris; identical to SEQ ID NO: 403

SEQ ID NO: 210511 - DNA, 562 bp, Canis familiaris; identical to SEQ ID NO: 404
  misc_feature (249)..(249): n is a, c, g, or t
  misc_feature (262)..(262): n is a, c, g, or t
  misc_feature (297)..(297): n is a, c, g, or t
  misc_feature (331)..(331): n is a, c, g, or t

SEQ ID NO: 210512 - DNA, 682 bp, Canis familiaris; identical to SEQ ID NO: 405

SEQ ID NO: 210513 - DNA, 607 bp, Canis familiaris; identical to SEQ ID NO: 406

SEQ ID NO: 210514 - DNA, 427 bp, Canis familiaris; identical to SEQ ID NO: 407
  misc_feature (2)..(2): n is a, c, g, or t
  misc_feature (23)..(23): n is a, c, g, or t
  misc_feature (44)..(44): n is a, c, g, or t
  misc_feature (60)..(60): n is a, c, g, or t
  misc_feature (74)..(75): n is a, c, g, or t
  misc_feature (93)..(93): n is a, c, g, or t
  misc_feature (99)..(99): n is a, c, g, or t

SEQ ID NO: 210515 - DNA, 602 bp, Canis familiaris; identical to SEQ ID NO: 408

SEQ ID NO: 210516 - DNA, 481 bp, Canis familiaris; identical to SEQ ID NO: 409

SEQ ID NO: 210517 - DNA, 636 bp, Canis familiaris; identical to SEQ ID NO: 410

SEQ ID NO: 210518 - DNA, 526 bp, Canis familiaris; identical to SEQ ID NO: 411

SEQ ID NO: 210519 - DNA, 549 bp, Canis familiaris; identical to SEQ ID NO: 412

SEQ ID NO: 210520 - DNA, 652 bp, Canis familiaris; identical to SEQ ID NO: 413

SEQ ID NO: 210521 - DNA, 584 bp, Canis familiaris; identical to SEQ ID NO: 414

SEQ ID NO: 210522 - DNA, 610 bp, Canis familiaris; identical to SEQ ID NO: 415
  misc_feature (376)..(376): n is a, c, g, or t

SEQ ID NO: 210523 - DNA, 347 bp, Canis familiaris; identical to SEQ ID NO: 416

SEQ ID NO: 210524 - DNA, 491 bp, Canis familiaris; identical to SEQ ID NO: 417

SEQ ID NO: 210525 - DNA, 225 bp, Canis familiaris; identical to SEQ ID NO: 418

SEQ ID NO: 210526 - DNA, 625 bp, Canis familiaris; identical to SEQ ID NO: 419

SEQ ID NO: 210527 - DNA, 588 bp, Canis familiaris; identical to SEQ ID NO: 420

SEQ ID NO: 210528 - DNA, 640 bp, Canis familiaris; identical to SEQ ID NO: 421

SEQ ID NO: 210529 - DNA, 535 bp, Canis familiaris; identical to SEQ ID NO: 422

SEQ ID NO: 210530 - DNA, 545 bp, Canis familiaris; identical to SEQ ID NO: 423

SEQ ID NO: 210531 - DNA, 415 bp, Canis familiaris; identical to SEQ ID NO: 424
  misc_feature (41)..(41): n is a, c, g, or t
  misc_feature (81)..(82): n is a, c, g, or t
  misc_feature (181)..(181): n is a, c, g, or t

SEQ ID NO: 210532 - DNA, 716 bp, Canis familiaris; identical to SEQ ID NO: 425

SEQ ID NO: 210533 - DNA, 583 bp, Canis familiaris; identical to SEQ ID NO: 426

SEQ ID NO: 210534 - DNA, 610 bp, Canis familiaris; identical to SEQ ID NO: 427

SEQ ID NO: 210535 - DNA, 398 bp, Canis familiaris; identical to SEQ ID NO: 428

SEQ ID NO: 210536 - DNA, 653 bp, Canis familiaris; identical to SEQ ID NO: 429

SEQ ID NO: 210537 - DNA, 603 bp, Canis familiaris; identical to SEQ ID NO: 430

SEQ ID NO: 210538 - DNA, 588 bp, Canis familiaris; identical to SEQ ID NO: 431

SEQ ID NO: 210539 - DNA, 667 bp, Canis familiaris; identical to SEQ ID NO: 432

SEQ ID NO: 210540 - DNA, 287 bp, Canis familiaris; identical to SEQ ID NO: 433

SEQ ID NO: 210541 - DNA, 704 bp, Canis familiaris; identical to SEQ ID NO: 434

SEQ ID NO: 210542 - DNA, 641 bp, Canis familiaris; identical to SEQ ID NO: 435

SEQ ID NO: 210543 - DNA, 669 bp, Canis familiaris; identical to SEQ ID NO: 436

SEQ ID NO: 210544 - DNA, 615 bp, Canis familiaris; identical to SEQ ID NO: 437

SEQ ID NO: 210545 - DNA, 620 bp, Canis familiaris; identical to SEQ ID NO: 438

SEQ ID NO: 210546 - DNA, 588 bp, Canis familiaris; identical to SEQ ID NO: 439

SEQ ID NO: 210547 - DNA, 647 bp, Canis familiaris; identical to SEQ ID NO: 440

SEQ ID NO: 210548 - DNA, 592 bp, Canis familiaris; identical to SEQ ID NO: 441

SEQ ID NO: 210549 - DNA, 593 bp, Canis familiaris; identical to SEQ ID NO: 442

SEQ ID NO: 210550 - DNA, 659 bp, Canis familiaris; identical to SEQ ID NO: 443

SEQ ID NO: 210551 - DNA, 574 bp, Canis familiaris; identical to SEQ ID NO: 444

SEQ ID NO: 210552 - DNA, 683 bp, Canis familiaris; identical to SEQ ID NO: 445

SEQ ID NO: 210553 - DNA, 685 bp, Canis familiaris; identical to SEQ ID NO: 446

SEQ ID NO: 210554 - DNA, 655 bp, Canis familiaris; identical to SEQ ID NO: 447

SEQ ID NO: 210555 - DNA, 528 bp, Canis familiaris; identical to SEQ ID NO: 448

SEQ ID NO: 210556 - DNA, 591 bp, Canis familiaris; identical to SEQ ID NO: 449
  misc_feature (373)..(373): n is a, c, g, or t

SEQ ID NO: 210557 - DNA, 627 bp, Canis familiaris; identical to SEQ ID NO: 450
  misc_feature (158)..(158): n is a, c, g, or t

SEQ ID NO: 210558 - DNA, 603 bp, Canis familiaris; identical to SEQ ID NO: 451

SEQ ID NO: 210559 - DNA, 574 bp, Canis familiaris; identical to SEQ ID NO: 452

SEQ ID NO: 210560 - DNA, 620 bp, Canis familiaris; identical to SEQ ID NO: 453

SEQ ID NO: 210561 - DNA, 644 bp, Canis familiaris; identical to SEQ ID NO: 454

SEQ ID NO: 210562 - DNA, 660 bp, Canis familiaris; identical to SEQ ID NO: 455
  misc_feature (7)..(7): n is a, c, g, or t

SEQ ID NO: 210563 - DNA, 578 bp, Canis familiaris; identical to SEQ ID NO: 456

SEQ ID NO: 210564 - DNA, 604 bp, Canis familiaris; identical to SEQ ID NO: 457

SEQ ID NO: 210565 - DNA, 529 bp, Canis familiaris; identical to SEQ ID NO: 458

SEQ ID NO: 210566 - DNA, 481 bp, Canis familiaris; identical to SEQ ID NO: 459

SEQ ID NO: 210567 - DNA, 635 bp, Canis familiaris; identical to SEQ ID NO: 460

SEQ ID NO: 210568 - DNA, 575 bp, Canis familiaris; identical to SEQ ID NO: 461

SEQ ID NO: 210569 - DNA, 496 bp, Canis familiaris; identical to SEQ ID NO: 462

SEQ ID NO: 210570 - DNA, 703 bp, Canis familiaris; identical to SEQ ID NO: 463

SEQ ID NO: 210571 - DNA, 627 bp, Canis familiaris; identical to SEQ ID NO: 464

SEQ ID NO: 210572 - DNA, 403 bp, Canis familiaris; identical to SEQ ID NO: 465

SEQ ID NO: 210573 - DNA, 644 bp, Canis familiaris; identical to SEQ ID NO: 466

SEQ ID NO: 210574 - DNA, 615 bp, Canis familiaris; identical to SEQ ID NO: 467

SEQ ID NO: 210575 - DNA, 699 bp, Canis familiaris; identical to SEQ ID NO: 468

SEQ ID NO: 210576 - DNA, 709 bp, Canis familiaris; identical to SEQ ID NO: 469

SEQ ID NO: 210577 - DNA, 549 bp, Canis familiaris; identical to SEQ ID NO: 470

SEQ ID NO: 210578 - DNA, 584 bp, Canis familiaris; identical to SEQ ID NO: 471

SEQ ID NO: 210579 - DNA, 676 bp, Canis familiaris; identical to SEQ ID NO: 472

SEQ ID NO: 210580 - DNA, 595 bp, Canis familiaris; identical to SEQ ID NO: 473

SEQ ID NO: 210581 - DNA, 545 bp, Canis familiaris; identical to SEQ ID NO: 474

SEQ ID NO: 210582 - DNA, 555 bp, Canis familiaris; identical to SEQ ID NO: 475

SEQ ID NO: 210583 - DNA, 577 bp, Canis familiaris; identical to SEQ ID NO: 476

SEQ ID NO: 210584 - DNA, 600 bp, Canis familiaris
cgtgtccactccacttattaggaatggggactggaccttccagatccttgtgatgctggagatgactccccagcgaggagatgtctacacttgccatgtggagcacgccagcctccagagccccatcacagtgcagtggyggscacagtctgaatctgcccagagcaagatgctgagtggcattggtggcttcgtgctggggctgatcttccttgggcttggccttatcatccgtcacaggagccagaaaggatctcgggggtctccaccggcagggctcctgcactgatgcctgaggataccggggattccatcctttgtagtgtccgtctgtccctgcccagaattcccagctgcctgacagactgtcccccacatagatcagagtcctacatgactctgaggactcttgaggatctgggtgttgattctgcttcctgcattgacctgtgtgctccctgctacaggatctactcaggccccaagggattttcctgtttccattcttccttcacagattgtgcaagagaagcacattgaagccatttacctgaagatagagattttatcataattaaatgtgattatgagttctctgta

SEQ ID NO: 210585 - DNA, 1400 bp, Canis familiaris
atggagagtaaccgccctccctaagactcaaggaagaagctcttgctccaccatcagcacccaaagctgarattctycttaaactatyccctgacacccctacattcatatattgaatyayccctrctgtgstatrtcagyatytccaggtaaacyyyyctycccycccctatgtacgtcgtgcattrrtrgyttgccccatgcatataagcatgtacatrwtattatatycttacataggacataytaamtcaayytcayarttcrytvrycydtcarcrgtaaycrratgcatatcacytagtccaataagggcttaatcaccatgcctcgagaaaccmtcaacccttgstcgwaatgtccctcttctcgctccgggcccatacyaacgtgggggttactatcatgaaactatayctggcatctggttcttacytcagggycataacyytatttactccaatcctaytaatyctykcaaatrggacatctcgatggactaatgactaatcagcccatgatcacacataactgtggtgtcatgcatytggtatcttttawtttttagggggggaatctgctatcactcayctayraccgcaacggcactaactctaacttatcttctgctctcagggratatgcccgtcgcggccctaaygcagtcaratracttgtrgctggwcttattcattatcaywtatcamctcacgcataaartcarggtgctatycagtcaatggtttcaggacatatwgttttarrgtacacgtrcgtacacgkmsgtacacgtacgtacacgtrsgtacacgtrcgtacacgtrcgtacacgtrcgtacacgtrcgtacacgtrcgtacacgkrcgtacacgtrcgtacacgtrcgtacacgtrcgtacacgtrcgtacacgtrcgtacacgtrcgtacacstrcgtacacgtrcgtacacgtrcgtacacgtrcgtacacgtrcgtacacrtrcgtacacgtrcgtacacgtrcgtacacgtrcgtacacgtrcgtacacgtrcgtacacgtrcgtacacgtrcgtacacgtacgyacgcgcgyaagacmttaagttaacttatacvraccccccttaccccccgtaaactcatgtcatctattatacacttatttatgtcccgccmaaccccmrwaacaggactaagtgcatacaatactcacaagctttatttaaattatatacmaatgtattgctactctagttaacttaacacaacagtcttacacgcatttggtctcgtagtctatctatagatagcattcccttttttttycctctcatatttactatgtattttatttattacgcacactacaatttcagtatraaaaaaaaaaaaaaaaaaaaaaaaaaaaaaaaaaaaaa

SEQ ID NO: 210586 - DNA, 712 bp, Canis familiaris; identical to SEQ ID NO: 479
  misc_feature (282)..(282): n is a, c, g, or t
  misc_feature (338)..(338): n is a, c, g, or t

SEQ ID NO: 210587 - DNA, 749 bp, Canis familiaris; identical to SEQ ID NO: 480

SEQ ID NO: 210588 - DNA, 977 bp, Canis familiaris; identical to SEQ ID NO: 481
  misc_feature (880)..(880): n is a, c, g, or t
  misc_feature (920)..(920): n is a, c, g, or t
  misc_feature (942)..(942): n is a, c, g, or t
  misc_feature (961)..(961): n is a, c, g, or t

SEQ ID NO: 210589 - DNA, 1272 bp, Canis familiaris; identical to SEQ ID NO: 482

SEQ ID NO: 210590 - DNA, 677 bp, Canis familiaris; identical to SEQ ID NO: 483

SEQ ID NO: 210591 - DNA, 669 bp, Canis familiaris; identical to SEQ ID NO: 484

SEQ ID NO: 210592 - DNA, 723 bp, Canis familiaris; identical to SEQ ID NO: 485

SEQ ID NO: 210593 - DNA, 751 bp, Canis familiaris; identical to SEQ ID NO: 486

SEQ ID NO: 210594 - DNA, 675 bp, Canis familiaris; identical to SEQ ID NO: 487
  misc_feature (302)..(302): n is a, c, g, or t

SEQ ID NO: 210595 - DNA, 600 bp, Canis familiaris
agaacttaagctaagctccccgaaaccagacgagctayccatraacaatctaaaaggatcaactcatctatgtagcaaaatagtgagaagatttgtgggtagaggtgaaaagcctaacgagcctggtgatagctggttacccacaracagaattttagttcaactttaawtttacctaaaaaaaataaaattttaatgtaaatttaaaatatagtctaagaaggtacagcttcttagaatcaggatacaacctttattagagagtatatactaatatcaccatagttggcttaaaagcagccaccaattgagaaagcgttccagctcaacaaacaatataacttaatcccaaccatactacatcaactcctaattataccccctgggtcattctatttaaatatagaacgaataatgctagtatgagtaacaagaaccactttctcctcgcataagcttatatcaggaacggatagaccactgatagttaacaatctgataatatcaacccaaaaatgaaatacttatccaccccattgttaacccaacacaggtatgcattcaaggaaagattaaaaggagtaaaaggaactcggcaaa

SEQ ID NO: 210596 - DNA, 701 bp, Canis familiaris; identical to SEQ ID NO: 489

SEQ ID NO: 210597 - DNA, 600 bp, Canis familiaris
tatttcaccaacgggacggagcgggtgcggcttctgacgagagacatctataaccgggaggagcacgtgcgcttcgacagcgacgtgggggagtaccgggcggtcacggagctcgggcggccsgacgctgagtactggaacgggcagaaggagctcttggagcggaggcgggccgaggtggacacggtgtgcagacacaactacgggagggaagagctcaccacgttgcagcggcgagtggaaccgacagtgaccatctccccgtccaagacagaggttctgaaccaccacaatctgctggtctgctcagtgacagatttctatccaggccagatcaaagtccggtggtttcggaatgaccaggagcagacagctggtgtcgtgtccactccacttattaggaatggggactggaccttccagatccttgtgatgctggagatgactccccagcgaggagatgtctacacttgccatgtggagcacgccagcctccagagccccatcacagtgcagtggcgggcacagtctgaatctgcccagagcaagatgctgagtggcattggtggcttcgtgctggggctgatcttccttgggctt

SEQ ID NO: 210598 - DNA, 719 bp, Canis familiaris; identical to SEQ ID NO: 491
  misc_feature (25)..(25): n is a, c, g, or t
  misc_feature (149)..(149): n is a, c, g, or t
  misc_feature (294)..(294): n is a, c, g, or t
  misc_feature (298)..(298): n is a, c, g, or t

SEQ ID NO: 210599 - DNA, 1071 bp, Canis familiaris; identical to SEQ ID NO: 492
  misc_feature (438)..(438): n is a, c, g, or t
  misc_feature (443)..(443): n is a, c, g, or t
  misc_feature (446)..(448): n is a, c, g, or t
  misc_feature (465)..(465): n is a, c, g, or t
  misc_feature (688)..(689): n is a, c, g, or t

SEQ ID NO: 210600 - DNA, 632 bp, Canis familiaris; identical to SEQ ID NO: 493

SEQ ID NO: 210601 - DNA, 793 bp, Canis familiaris; identical to SEQ ID NO: 494

SEQ ID NO: 210602 - DNA, 661 bp, Canis familiaris; identical to SEQ ID NO: 495

SEQ ID NO: 210603 - DNA, 697 bp, Canis familiaris; identical to SEQ ID NO: 496

SEQ ID NO: 210604 - DNA, 450 bp, Canis familiaris; identical to SEQ ID NO: 497

SEQ ID NO: 210605 - DNA, 718 bp, Canis familiaris; identical to SEQ ID NO: 498

SEQ ID NO: 210606 - DNA, 1042 bp, Canis familiaris; identical to SEQ ID NO: 499

SEQ ID NO: 210607 - DNA, 627 bp, Canis familiaris; identical to SEQ ID NO: 500

SEQ ID NO: 210608 - DNA, 730 bp, Canis familiaris; identical to SEQ ID NO: 501

SEQ ID NO: 210609 - DNA, 619 bp, Canis familiaris; identical to SEQ ID NO: 502
  misc_feature (560)..(560): n is a, c, g, or t
  misc_feature (578)..(578): n is a, c, g, or t
  misc_feature (588)..(588): n is a, c, g, or t

SEQ ID NO: 210610 - DNA, 1021 bp, Canis familiaris; identical to SEQ ID NO: 503
  misc_feature (376)..(376): n is a, c, g, or t
  misc_feature (509)..(509): n is a, c, g, or t

SEQ ID NO: 210611 - DNA, 559 bp, Canis familiaris; identical to SEQ ID NO: 504

SEQ ID NO: 210612 - DNA, 634 bp, Canis familiaris; identical to SEQ ID NO: 505

SEQ ID NO: 210613 - DNA, 1040 bp, Canis familiaris; identical to SEQ ID NO: 506
  misc_feature (816)..(816): n is a, c, g, or t
  misc_feature (870)..(870): n is a, c, g, or t

SEQ ID NO: 210614 - DNA, 1040 bp, Canis familiaris; identical to SEQ ID NO: 507
  misc_feature (171)..(171): n is a, c, g, or t
  misc_feature (225)..(225): n is a, c, g, or t

SEQ ID NO: 210615 - DNA, 668 bp, Canis familiaris; identical to SEQ ID NO: 508

SEQ ID NO: 210616 - DNA, 537 bp, Canis familiaris; identical to SEQ ID NO: 509

SEQ ID NO: 210617 - DNA, 716 bp, Canis familiaris; identical to SEQ ID NO: 510

SEQ ID NO: 210618 - DNA, 804 bp, Canis familiaris; identical to SEQ ID NO: 511

SEQ ID NO: 210619 - DNA, 501 bp, Canis familiaris; identical to SEQ ID NO: 512

SEQ ID NO: 210620 - DNA, 630 bp, Canis familiaris; identical to SEQ ID NO: 513

SEQ ID NO: 210621 - DNA, 624 bp, Canis familiaris; identical to SEQ ID NO: 514

SEQ ID NO: 210622 - DNA, 695 bp, Canis familiaris; identical to SEQ ID NO: 515

SEQ ID NO: 210623 - DNA, 687 bp, Canis familiaris; identical to SEQ ID NO: 516

SEQ ID NO: 210624 - DNA, 743 bp, Canis familiaris; identical to SEQ ID NO: 517
  misc_feature (355)..(355): n is a, c, g, or t

SEQ ID NO: 210625 - DNA, 683 bp, Canis familiaris; identical to SEQ ID NO: 518

SEQ ID NO: 210626 - DNA, 748 bp, Canis familiaris; identical to SEQ ID NO: 519

SEQ ID NO: 210627 - DNA, 457 bp, Canis familiaris; identical to SEQ ID NO: 520

SEQ ID NO: 210628 - DNA, 766 bp, Canis familiaris; identical to SEQ ID NO: 521

SEQ ID NO: 210629 - DNA, 767 bp, Canis familiaris; identical to SEQ ID NO: 522

SEQ ID NO: 210630 - DNA, 703 bp, Canis familiaris; identical to SEQ ID NO: 523

SEQ ID NO: 210631 - DNA, 267 bp, Canis familiaris; identical to SEQ ID NO: 524

SEQ ID NO: 210632 - DNA, 630 bp, Canis familiaris; identical to SEQ ID NO: 525

SEQ ID NO: 210633 - DNA, 1165 bp, Canis familiaris; identical to SEQ ID NO: 526

SEQ ID NO: 210634 - DNA, 600 bp, Canis familiaris
aaccgggaggaghwcstgcgcttcgacagcgacgtgggggagtwccgggcggtcacggagctcgggcggcscrwcgctgagtmctggaacsggcagaaggagmtcttggagcrgargcgggccgmggtggacacskwstgcagacacaactacggggtgrkygagagcttcrcggtgcagcggcgagtcgagcctacagtgactgtgtatcctacgaagactcagaccttgcagcatcacaacctcctggtctgctctgtgaatggtttctatccaggccacattgaagtcaggtggctccggaatggccaggaagaggaagctggggttgtgtccacaggcctaatccgtaatggagactggaccttccagatcctggtgatgctggagatagttcctcagagcggagaggtctacacctgccaagtggagcacccaagtttgacaagccctgtcaccgtggaatggagggcacagtctgattctgcacagagcaagatgctgagtggaatcgggggctttgtcctgggtctgctcttccttgcagtggggctgttcatctacttcagaaatcagaagggacactctggacttcagcca

SEQ ID NO: 210635 - DNA, 600 bp, Canis familiaris
aaccgggaggagcacgtgcscttcgacagcgacgtgggggagtwccgggcggtcacggagctcgggcggcccgacgctgagtactggaacgggcagaaggagctcttggagcagaggcgggccgaggtggacacskwstgcagacacaactacggggtgattgagagcttcrcggtgcagcggcgagtcgagcctacagtgactgtgtatcctacgaagactcagaccttgcagcatcacaacctcctggtctgctctgtgaatggtttctatccaggccacattgaagtcaggtggctccggaatggccaggaagaggaagctggggttgtgtccacaggcctaatccgtaatggagactggaccttccagatcctggtgatgctggagatagttcctcagagcggagaggtctacacctgccaagtggagcacccaagtttgacaagccctgtcaccgtggaatggagggcacagtctgattctgcacagagcaagatgctgagtggaatcgggggctttgtcctgggtctgctcttccttgcagtggggctgttcatctacttcagaaatcagaagggacactctggacttcagcca

SEQ ID NO: 210636 - DNA, 1167 bp, Canis familiaris; identical to SEQ ID NO: 529

SEQ ID NO: 210637 - DNA, 1125 bp, Canis familiaris; identical to SEQ ID NO: 530

SEQ ID NO: 210638 - DNA, 624 bp, Canis familiaris; identical to SEQ ID NO: 531

SEQ ID NO: 210639 - DNA, 802 bp, Canis familiaris; identical to SEQ ID NO: 532

SEQ ID NO: 210640 - DNA, 677 bp, Canis familiaris; identical to SEQ ID NO: 533
  misc_feature (6)..(6): n is a, c, g, or t

SEQ ID NO: 210641 - DNA, 659 bp, Canis familiaris; identical to SEQ ID NO: 534

SEQ ID NO: 210642 - DNA, 645 bp, Canis familiaris; identical to SEQ ID NO: 535

SEQ ID NO: 210643 - DNA, 660 bp, Canis familiaris; identical to SEQ ID NO: 536

SEQ ID NO: 210644 - DNA, 621 bp, Canis familiaris; identical to SEQ ID NO: 537

SEQ ID NO: 210645 - DNA, 697 bp, Canis familiaris; identical to SEQ ID NO: 538

SEQ ID NO: 210646 - DNA, 1400 bp, Canis familiaris
ggagagcctggtgagaaggggcccagaggtcttcctggcttaaagggacacaatggactgcaaggtcttcctggtcttgctggtcaacatggcgatcaaggtgcacctggttctgtgggtcctgctggtcctaggggtcctgctggtccttctggccctgctggcaaagatggtcgcactgggcaacctggtacagtcggacctgctggcattcgtggctctcagggtagccaaggtcctgctggccctcctggtccccctggccctcctggccctcctggcccaagtggtggtggctatgactttggttatgaaggggacttctacagggctgaccagcctcgctcaccaccttctctcagacccaaggactatgaagttgatgctactctgaaatccctcaacaaccagattgagacccttcttactcctgaaggctctaggaagaacccagctcgcacatgccgagacctgagactcagccacccagagtggagcagtggttactactggattgaccctaaccaaggatgcactatggatgctatcaaagtatactgtgatttctctactggcgaaacctgcattcgggctcaacctgaaaacatcccagccaagaactggtacagaaactccaaggtcaagaagcacatctggttaggagaaactatcaatggtggtacccagtttgaatataatgttgaaggagtaaccaccaaggaaatggctactcaactcgccttcatgcgcctgctggccaaccatgcctctcaaaacatcacctaccactgcaagaacagcattgcctatatggatgaggagactggcaacctgaaaaaggctgtcattctgcaaggttccaatgatgttgaactggttgccgagggcaacagcaggttcacctacactgttcttgtagacggctgctctaaaaagacaaatgaatggagaaagacmatcattgaatacaaaacwaataagccatcccgcctgcctatccttgatattgcacctttggacatcggtgatgctgaccaagaattcagggtggacgttggcccagtctgtttcaaatataatgaactcaacctaaattaaaaaaaaaaaagaaatctgaaaaaactttctctctttgccatttctttttcttcttttttttttaactgaragttgagtccttccatttcctctgcacatctacttgcttaaattgtgggcaaaagagaaggagaaggattgatcagagcatagtgcaatacgatttcattcattccccctccctgcccccaaraatttggaattttttttcaacactcttacatccgttgtggaaaatgtcaacctttgttagaaaaccaaaataaaaattgaaaaataaaataaaaaccatgaacatttgc

SEQ ID NO: 210647 - DNA, 639 bp, Canis familiaris; identical to SEQ ID NO: 540

SEQ ID NO: 210648 - DNA, 639 bp, Canis familiaris; identical to SEQ ID NO: 541

SEQ ID NO: 210649 - DNA, 650 bp, Canis familiaris; identical to SEQ ID NO: 542

SEQ ID NO: 210650 - DNA, 659 bp, Canis familiaris; identical to SEQ ID NO: 543

SEQ ID NO: 210651 - DNA, 691 bp, Canis familiaris; identical to SEQ ID NO: 544

SEQ ID NO: 210652 - DNA, 683 bp, Canis familiaris; identical to SEQ ID NO: 545

SEQ ID NO: 210653 - DNA, 748 bp, Canis familiaris; identical to SEQ ID NO: 546

SEQ ID NO: 210654 - DNA, 644 bp, Canis familiaris; identical to SEQ ID NO: 547

SEQ ID NO: 210655 - DNA, 599 bp, Canis familiaris; identical to SEQ ID NO: 548

SEQ ID NO: 210656 - DNA, 662 bp, Canis familiaris; identical to SEQ ID NO: 549

SEQ ID NO: 210657 - DNA, 704 bp, Canis familiaris; identical to SEQ ID NO: 550

SEQ ID NO: 210658 - DNA, 689 bp, Canis familiaris; identical to SEQ ID NO: 551

SEQ ID NO: 210659 - DNA, 639 bp, Canis familiaris; identical to SEQ ID NO: 552

SEQ ID NO: 210660 - DNA, 641 bp, Canis familiaris; identical to SEQ ID NO: 553

SEQ ID NO: 210661 - DNA, 758 bp, Canis familiaris; identical to SEQ ID NO: 554

SEQ ID NO: 210662 - DNA, 653 bp, Canis familiaris; identical to SEQ ID NO: 555

SEQ ID NO: 210663 - DNA, 701 bp, Canis familiaris; identical to SEQ ID NO: 556

SEQ ID NO: 210664 - DNA, 673 bp, Canis familiaris; identical to SEQ ID NO: 557

SEQ ID NO: 210665 - DNA, 618 bp, Canis familiaris; identical to SEQ ID NO: 558
  misc_feature (31)..(31): n is a, c, g, or t

SEQ ID NO: 210666 - DNA, 644 bp, Canis familiaris; identical to SEQ ID NO: 559

SEQ ID NO: 210667 - DNA, 1400 bp, Canis familiaris
ccacatgactacagatgggtgattcttatcccgacgcaccagctcccccatcacctccagatggtgctgcagggacacattgctgtagctctggaccagcatgatgcccacaccagggctctcgtcgatgaccacgatcccatagcggtcgcagagctgcatcacctcctccgcgtaggggtagtggctggtgcggaaggcattggcgcccagccagcgcaacaggttgaagtccttcaccagcagcggccagtcaaagcccttccctcggatatcggcatcctcatgtttgttgaccccatggaaatagaaaggtttcccgttgatgaggaactggcgctctgtgacggccacggtgcgaatccccacggggagagtatagaagtctgacacaggcccagcggccatctgcgcagtcagcctcacctccaacgagtacaggtaggcggggtgctcatgcatcaggtacggccaccagaggtggacattgggcacctgcagccggccctggctccctgtcccctgggccacgaccttgccttcctcatccagaagatacacttccagctggaagtgttcactgccctggacaaaaatctggtaatccaccagcccagtgtcttggtccacgccggtggtgacggtgatgtcgtcgatgtaggtagtaggtgtggtgtagaggagcacagggcgatgcaggcccgcgtagttgaagaagtcaaagtatgtgttctggacgaagtaacccttggggtacttggaagcgtctgtcttgtagacgatggtccctggcggcagagtgtgkggggtgagcgtgttgttgatgscaagggtaatacggcaggaggacaggggcccgctctggaccaacttgctgattgtcagcttcgaaggggaggtgacccccctcgtgcttctgccacatggacccccattcacccacacgatggcatagtagtgggcgctgccaatcctcagcaccactctcgtgcccgggtcctggctccatcgccggggcagggtggcctcccgctcgtaccacacccagccgacaaagctgcgcagctgcctatcctggcccacatcattgaagctggacggaactggcatgtccagggtggggcccgactcgcgcagcggcgcccggtaccactgctgctcgaagccctggcgccggccgtcggagaagtcggcgcggaagctccagaggccgtcgaggtccttgcgctcccgcgacgggctctcccgggggtacagcatcccgccctccagcgccagcccgcaggtccaaagcagcgggccgagcgctacccaggcccccgccggcccccgagacatgcttccgtcgcggccgcgcgtggccccggcgcgcagcccgcagcccgcagcccgcagccccg

SEQ ID NO: 210668 - DNA, 672 bp, Canis familiaris; identical to SEQ ID NO: 561

SEQ ID NO: 210669 - DNA, 677 bp, Canis familiaris; identical to SEQ ID NO: 562

SEQ ID NO: 210670 - DNA, 625 bp, Canis familiaris; identical to SEQ ID NO: 563

SEQ ID NO: 210671 - DNA, 719 bp, Canis familiaris; identical to SEQ ID NO: 564

SEQ ID NO: 210672 - DNA, 691 bp, Canis familiaris; identical to SEQ ID NO: 565

SEQ ID NO: 210673 - DNA, 620 bp, Canis familiaris; identical to SEQ ID NO: 566

SEQ ID NO: 210674 - DNA, 696 bp, Canis familiaris; identical to SEQ ID NO: 567

SEQ ID NO: 210675 - DNA, 692 bp, Canis familiaris; identical to SEQ ID NO: 568

SEQ ID NO: 210676 - DNA, 716 bp, Canis familiaris; identical to SEQ ID NO: 569

SEQ ID NO: 210677 - DNA, 624 bp, Canis familiaris; identical to SEQ ID NO: 570

SEQ ID NO: 210678 - DNA, 695 bp, Canis familiaris; identical to SEQ ID NO: 571

SEQ ID NO: 210679 - DNA, 709 bp, Canis familiaris; identical to SEQ ID NO: 572

SEQ ID NO: 210680 - DNA, 660 bp, Canis familiaris; identical to SEQ ID NO: 573

SEQ ID NO: 210681 - DNA, 622 bp, Canis familiaris; identical to SEQ ID NO: 574

SEQ ID NO: 210682 - DNA, 662 bp, Canis familiaris; identical to SEQ ID NO: 575

SEQ ID NO: 210683 - DNA, 634 bp, Canis familiaris; identical to SEQ ID NO: 576

SEQ ID NO: 210684 - DNA, 1400 bp, Canis familiaris
tggccaaggcggttccaaacttgggactaagaggactctgcccaagaagagctttgagcagatcagtgccaacatcactaagtttaacattcagggcctgatcatcatcgggggctttgaggcttacactgggggcctggagctgatggagggcaggaagcagtttgatgagctgtgcatcccgtttgtggtcatccctgctacggtgtccaacaacgtccctggctcggacttcagcgtgggcgctgacacagccctcaacactatctgcacgacctgtgaccgcatcaagcagtcagcagcaggcaccaagcggcgggtgttcatcattgaaactatgggtggctactgcggctacctggccaccatggcaggcctggccgctggggcggatgctgcctacatttttgaggagcccttcaccattcgggacctgcaggcaaatgttgaacatctggtgcaaaagatgaaaacaactgtgaagaggggcctggtgttaaggaatgagaagtgcaatgagaactataccacggacttcattttcaacctgtactctgaggaggggaagggcatcttcgacagcaggaagaatgtgctcggccacatgcagcagggtgggagcccaactccatttgataggaattttgccactaagatgggcgccaaggctatgaactggatgtctgggaaaatcaaagagagttaccgtaatgggaggatctttgccaatacgccagactcgggctgtgttctggggatgcgtaagagggctctggtctttcaaccagtgactgagctgaaggaccagacagattttgatcaccgcatccccaaggmacagtggtggctgaagctgaggcccatcctcmaaatcctagccaagtacgagattgacttggacaccacagagcacgcccaccctggagcacatcagtcggaagcgatctggagaaacttctatctaaccctctttggagtgagggtcatggattgtctgatcatggtcagctcaccccctgatagatccaagtccatgtatccccaagtattttagctcatttttctttaggtttccttttattctgcaactgtagccatgaccagctctggccagggagctggggcagcgggcagtgagtagaggctccttttaggtggaatttatcaacttctaccccagcttcatctgtcacacaagactgggctcctctagtgctactgctagatttcagctactcggttagaattttcctgaaaataagctttatttatttctttgtgataacacaagtcttggttcctctattacttttactgcagtgacaaacaatagctacactaataaatgccmactggtcactgtgaaaaaaaaaaaaaaaaaaaaaaaaaaaaaaaaaaaa

SEQ ID NO: 210685 - DNA, 627 bp, Canis familiaris; identical to SEQ ID NO: 578

SEQ ID NO: 210686 - DNA, 679 bp, Canis familiaris; identical to SEQ ID NO: 579

SEQ ID NO: 210687 - DNA, 646 bp, Canis familiaris; identical to SEQ ID NO: 580

SEQ ID NO: 210688 - DNA, 600 bp, Canis familiaris
ttcttcagcaaagcctcatctaataccaaatagaacacttatagatagtaagcaatatattcaacattaccagttattagtaattatttgtgaaagaagtaaccaagttctatagctgcactgatgttaataagtgggaaatctgaaatgctaaaattctattcctttcattttaatgttcattattacttatatcaacaccaaactataaaatgtgaagctatgggttatttccctaagtaaaataaaaataagtttttgtttttcattctgccttcaatagaaattaaaacctttttcttgaagattacggaatactagaactcagattataatgtagaacaaaaacctaacctttaaacggaacttatttattctgttttcatgatatgtaaagaataagatataataagacaatttatttaaaatttttaaataccaatattctttctacttgtagaataaattctactaatcttaatttacagggtactaaaatgaactcatttttaaatgtttaatgttgccttttatatactttagttggttcaaaatgtttatttaatgcaaatcacctatattaaaaaaagaaccttcttg

SEQ ID NO: 210689 - DNA, 699 bp, Canis familiaris; identical to SEQ ID NO: 582

SEQ ID NO: 210690 - DNA, 645 bp, Canis familiaris; identical to SEQ ID NO: 583

SEQ ID NO: 210691 - DNA, 1400 bp, Canis familiaris
cccgccgtcgggcctgggcttcacccgcggggacgtcttccatgtgctggacacgctgtgccccggccccgggccgagcggcgcccgcgggacccactggctggccgtgcgcatgggccgcgacctccgggagcaggagcgcggcatcatccccaaccagagcagggccgagcagctggccagtctggagtccgcccagcgcgccgtgggggccgggccaggtgcctccgtgggctccagcgcgagggccgagttctggcggctgcggggcctgcggcgtggagccaagaagtccacccagcggagccgcgaggacctatcggctctgaccaggcagggccactacccaccgtatgaacgcgtggtgctgcgagaagccagcttcaagcgcccggtggtgatcctggggcccgtggcggatatcgctatgcagaagctgactgccgagatgcctgaccagttcggaatcgcagacagcgtgttgaggaccgacagcccctccaagatcatcaagctggacaccgtgcgcgtgatcgcggagaagaacaagcacgcgctcttggacgtgacgccgtcggcggtcgagcgcctcaactacgtgcagtactaccccatcgtggtcttctgcgcccccgagagccgggcggccctcaaggccctgcgccagtggctggcgcccgcctcccgccgcagcgcgcgccgcctctacgcgcaagcccagaagcttcggaagcacagcgaacacctgttcacggccaccatccccctgcgcggcacgagcgacacctggtaccaggagctcaaggccgtggtccgcgagcagcagacccggcccatctggacggcggaggaccagctggacaactcgtccgaggacaacctggagctccctcaccgcggcctggccgacagttcggcggatctgagctgcgacagccgggtcaacagcgactacgagacggacggcgagggctacacggacggcgagggctacacggacgtgkacgaggggccgccggcgcccgctctggcccggtcctcggagcccgtgctggaggaggagccccggagcccgcgggatcacgggagagcctcgggtgcccgaggagcccaggtggacaggcacccctaccacagccaggggcgacaggacagcatgcggacgtatgggcaggaagccctgaagaagaagtttacacgagctcgagatgtggagtcctccgatgaggacggctatgactggggcccggccaccgacctgtgacccctcccaggttccctggggctggacctggtttcccactcagaacccagaaccccgcgtccttctgccagtcattaataaataagagtattttcacmammaaaaaaaaaaaaaaaaaaaaaaaaaaaaaaaaaaa

SEQ ID NO: 210692 - DNA, 652 bp, Canis familiaris; identical to SEQ ID NO: 585

SEQ ID NO: 210693 - DNA, 1400 bp, Canis familiaris
ggccaaaactcagaacagagaagaatcctttgacatctccagatcccatgactataagtcaaacccctcagccgttgctggtaatgaagtttctggggcatctaccagaagctgtcctcctcctattgcagcaaaaccttcctttggaaggtctatactgaagccctccactcctgtcccttccccagagagtgaggaggtgggagagggcagtgaagagcaagaaggcgctcccaagtctgtcctgggcaaagttaaaatatttgagaagatggatcacaaggcaagattacagagaatgcaggagcttcaagaagcacagaatgcaaggattgaaattgctcagaagcatcctgacatctatgcagttccaatcaaaacacacaagccagaccctggcctgtcccagcacacaagttccaggccacccgagccccagaaaggcccttccaggctctaccaggatcccagaggaagttatggcagtgatgctgaagaggaagaataccgccagcagctgtccgaacactcgaagcgtggctattacagccagccttcccggtaccgggacacggaattatagatgcctgatagtcggcgtgtccgtctccccactgccaccacctcggagcagcgctcccactgagcatgcgacggttctttctagggaaagtgcactgcggagatttgggaccctgaactcccatttcctcaaggggagccccgggggcagccaatgcaaataaaaactgagggctctgtttgtggaactgggtcttgagagttgatggctttttgctcagaatcmagagaaacactacagtctgatactgttacctgcttcagtggaccaaaatttgtattaattctgtttgcgtatttttaacatgtatattaagaagtgataactattttccctcattaatatctgcctttgaggactgtttcaatgagagatggaatgtgaaaaaggaattaaaatgctgttggactcccaactaaattcaaagaaatattttattacaactctaagtgcctttgatgagaagtgtcttaaatattcttcctttgaagctttatgcmaagccataatggactaagactattttgactaaagttttataccagcttaataactatggttttctytgcactgtgtcatcttttcaaggcatttgtctttgtaatattttccataaactctgtatatatagtagctacatgtggtagttcagctaccagtgctaaatagcttgacgaccaagaaatyggtatagaaatttttgtttaaaccatgtgctccagaaaagcagatacttggaaaaactgtatttccamaagtgtgtgtattgacaacagttttataatttaataaaaaggakattgaaatcaaaaaaaaa

SEQ ID NO: 210694 - DNA, 656 bp, Canis familiaris; identical to SEQ ID NO: 587

SEQ ID NO: 210695 - DNA, 669 bp, Canis familiaris; identical to SEQ ID NO: 588

SEQ ID NO: 210696 - DNA, 669 bp, Canis familiaris; identical to SEQ ID NO: 589

SEQ ID NO: 210697 - DNA, 680 bp, Canis familiaris; identical to SEQ ID NO: 590

SEQ ID NO: 210698 - DNA, 680 bp, Canis familiaris; identical to SEQ ID NO: 591

SEQ ID NO: 210699 - DNA, 701 bp, Canis familiaris; identical to SEQ ID NO: 592

SEQ ID NO: 210700 - DNA, 691 bp, Canis familiaris; identical to SEQ ID NO: 593

SEQ ID NO: 210701 - DNA, 672 bp, Canis familiaris; identical to SEQ ID NO: 594

SEQ ID NO: 210702 - DNA, 642 bp, Canis familiaris; identical to SEQ ID NO: 595

SEQ ID NO: 210703 - DNA, 687 bp, Canis familiaris; identical to SEQ ID NO: 596

SEQ ID NO: 210704 - DNA, 639 bp, Canis familiaris; identical to SEQ ID NO: 597

SEQ ID NO: 210705 - DNA, 644 bp, Canis familiaris; identical to SEQ ID NO: 598

SEQ ID NO: 210706 - DNA, 699 bp, Canis familiaris; identical to SEQ ID NO: 599

SEQ ID NO: 210707 - DNA, 693 bp, Canis familiaris; identical to SEQ ID NO: 600

SEQ ID NO: 210708 - DNA, 130 bp, Canis familiaris; identical to SEQ ID NO: 601

SEQ ID NO: 210709 - DNA, 646 bp, Canis familiaris; identical to SEQ ID NO: 602

SEQ ID NO: 210710 - DNA, 694 bp, Canis familiaris; identical to SEQ ID NO: 603

SEQ ID NO: 210711 - DNA, 686 bp, Canis familiaris; identical to SEQ ID NO: 604

SEQ ID NO: 210712 - DNA, 993 bp, Canis familiaris; identical to SEQ ID NO: 605
  misc_feature (985)..(985): n is a, c, g, or t

SEQ ID NO: 210713 - DNA, 642 bp, Canis familiaris; identical to SEQ ID NO: 606

SEQ ID NO: 210714 - DNA, 658 bp, Canis familiaris; identical to SEQ ID NO: 607

SEQ ID NO: 210715 - DNA, 640 bp, Canis familiaris; identical to SEQ ID NO: 608

SEQ ID NO: 210716 - DNA, 626 bp, Canis familiaris; identical to SEQ ID NO: 609

SEQ ID NO: 210717 - DNA, 626 bp, Canis familiaris; identical to SEQ ID NO: 610

SEQ ID NO: 210718 - DNA, 632 bp, Canis familiaris; identical to SEQ ID NO: 611

SEQ ID NO: 210719 - DNA, 1400 bp, Canis familiaris
tgacctgtgtgtgccccagctccagctcaccgccatcgtgatgggctccccactcctcattggagccgataatgtactggagctgcagatggatgcggccaatgagggcgagggggcctacgaagcagagcttgctgtgcacctgcccccaggtgcccamtacatgcgggccatcagcaacattgagggctttgagagactcatctgtaaccagaagaaggagaatgagaccaagatagtgctgtgtgagctgggtaaccccatgaagaggaacgcccggataggaatcaccatgttggtgagtgtggagaacctggaagaggctggggaacatgtgtccttctggctgcaaatcagaagcaaaaacagccagaatccgaacagtgaggctgtgctgctggatgtgccagtgcgggcagaggcccatgtgaagctaagagggaactcctttccagcctctctggtggtggtggcagaagaagacaacagggagaacagctcagagagctggggccccaaagtggagcacacctacgagcttcacaacaatggccctggtaccgtaagtggcctccacctccacctctgctttcctggggagtcccagccttctgacctgctctacatcctggacatacaacctgaggggggacttcaatgctccccccagccctctattaaccccttcaagctggactggaggcagcctacccccagcccttcccccacttccccggggtatcacaagcgggagcgcaggcaggcttctctgccagggtccagccagccctctgggcttcaggatccagttctcctgagctgcaagtcggggccgcatacagtggtgcagtgtgagctgcaggagatggcgcgagggcagcgagccatggtcaaggtgctagctttcctgcagctgcccagcctccagcagaggccgctggatcagttcgtgctggaatcgcaagcttggttcaacgtctcctcccttccctacgctgtgccctccctcagcctgcccagtggggaaactctggtgcagacacacttgcttcgtgccttggaggagagggacattcccatctggtgggtgctggtaggcgtactcggaggcctgctgttgctcatgctcctggtcctggccatgtggaagggcggcttcttcaagcgcaaccggccaccgctagaagaagaggaggaggagtgatggagcagctcacgctctgtcctaggaggaaggctggggacctgcctgctctgccctttcttcagtgtgcgccccccagctctgctcacccacgggttggagctgtgccatggaggcctcctgatacccccctctacctcatcccccagagctggccactcctttccctgctgccaaataaagaggctgagtccca

SEQ ID NO: 210720 - DNA, 746 bp, Canis familiaris; identical to SEQ ID NO: 613

SEQ ID NO: 210721 - DNA, 657 bp, Canis familiaris; identical to SEQ ID NO: 614

SEQ ID NO: 210722 - DNA, 683 bp, Canis familiaris; identical to SEQ ID NO: 615

SEQ ID NO: 210723 - DNA, 748 bp, Canis familiaris; identical to SEQ ID NO: 616

SEQ ID NO: 210724 - DNA, 639 bp, Canis familiaris; identical to SEQ ID NO: 617

SEQ ID NO: 210725 - DNA, 668 bp, Canis familiaris; identical to SEQ ID NO: 618

SEQ ID NO: 210726 - DNA, 737 bp, Canis familiaris; identical to SEQ ID NO: 619

SEQ ID NO: 210727 - DNA, 700 bp, Canis familiaris; identical to SEQ ID NO: 620

SEQ ID NO: 210728 - DNA, 699 bp, Canis familiaris; identical to SEQ ID NO: 621

SEQ ID NO: 210729 - DNA, 781 bp, Canis familiaris; identical to SEQ ID NO: 622

SEQ ID NO: 210730 - DNA, 671 bp, Canis familiaris; identical to SEQ ID NO: 623

SEQ ID NO: 210731 - DNA, 699 bp, Canis familiaris; identical to SEQ ID NO: 624
  misc_feature (51)..(51): n is a, c, g, or t

SEQ ID NO: 210732 - DNA, 685 bp, Canis familiaris; identical to SEQ ID NO: 625

SEQ ID NO: 210733 - DNA, 633 bp, Canis familiaris; identical to SEQ ID NO: 626

SEQ ID NO: 210734 - DNA, 649 bp, Canis familiaris; identical to SEQ ID NO: 627

SEQ ID NO: 210735 - DNA, 835 bp, Canis familiaris; identical to SEQ ID NO: 628

SEQ ID NO: 210736 - DNA, 712 bp, Canis familiaris; identical to SEQ ID NO: 629

SEQ ID NO: 210737 - DNA, 728 bp, Canis familiaris; identical to SEQ ID NO: 630

SEQ ID NO: 210738 - DNA, 668 bp, Canis familiaris; identical to SEQ ID NO: 631

SEQ ID NO: 210739 - DNA, 668 bp, Canis familiaris; identical to SEQ ID NO: 632

SEQ ID NO: 210740 - DNA, 708 bp, Canis familiaris; identical to SEQ ID NO: 633

SEQ ID NO: 210741 - DNA, 689 bp, Canis familiaris; identical to SEQ ID NO: 634

SEQ ID NO: 210742 - DNA, 600 bp, Canis familiaris
  misc_feature (96)..(97): n is a, c, g, or t
actgggaatgtttaggtccaagaagccttcaagtgcacgggagctgtccttctttgggtgggtggtgtgatttttgtgtgtcaagtggcactgcanntcaagtggcatgcactgcagggcatggatgtgcatgtatgggctggggcaatccttgcctcaatatctaagaaatttactaatagatctgttgaatggaggagggaccaggctcatgagccttcatcttcagaaatgggagagtatctgttagggctgcaggacagctttaggaatgagatggaggccactgggatcccaaggttcttccaactatttgagctccaatcttcttgctcccagtttgtccacctttctttaagtcccagtctccctgtctcttgttctaggttctctcttcacactcttacttctcttctgtctctccacaggctaccacattcaatactagagctcctgtaaactctcctggccctgccccagccaagtattctccagacaggcagcccccagatgaagcctgctcattgtcttctggcatcagaaatagctggccacaaggcccagagctcatgtggaactgggctgagtgggcatgtgtac

SEQ ID NO: 210743 - DNA, 666 bp, Canis familiaris; identical to SEQ ID NO: 636

SEQ ID NO: 210744 - DNA, 669 bp, Canis familiaris; identical to SEQ ID NO: 637

SEQ ID NO: 210745 - DNA, 600 bp, Canis familiaris
gaatgggaactgcagcatgatgctggcctgcgaagtggaaaagggggacaatgtggtttacagctggagtgagaaactggggattgacccactgatcccagccaacagttctcacctcttgcacctcagcctcggccctcagcatgtcaacaacgtctatgtctgcaccgtgagcaaccccgtcagcaaccgctcatggtccttcaacccatggtccaagtgcaggccagagtcttcggtgccaagacaatggagactgtatgctgggctcttcttagggggtatcgttggtgtcatcttgattttcgaagtggtattactgctgttgagaagaagaggtaaaacaaatcattacaagccaacaaaggaagaaaaaagccttaccatctatgcccaagtccagaaatcaggttctactcagaagaaacctgatcccttgccagctgaggacccctgcaccaccatttatgttgctgccacagaacctgtcccagaacctgccccagaacctgtscaggaaccacattctatcacggtctatgccagcgtgacgttcccagagagctgacaccacaggctcagtgaagggactttctgaag

SEQ ID NO: 210746 - DNA, 632 bp, Canis familiaris; identical to SEQ ID NO: 639

SEQ ID NO: 210747 - DNA, 661 bp, Canis familiaris; identical to SEQ ID NO: 640

SEQ ID NO: 210748 - DNA, 686 bp, Canis familiaris; identical to SEQ ID NO: 641

SEQ ID NO: 210749 - DNA, 636 bp, Canis familiaris; identical to SEQ ID NO: 642

SEQ ID NO: 210750 - DNA, 682 bp, Canis familiaris; identical to SEQ ID NO: 643
  misc_feature (2)..(2): n is a, c, g, or t

SEQ ID NO: 210751 - DNA, 652 bp, Canis familiaris; identical to SEQ ID NO: 644

SEQ ID NO: 210752 - DNA, 643 bp, Canis familiaris; identical to SEQ ID NO: 645

SEQ ID NO: 210753 - DNA, 690 bp, Canis familiaris; identical to SEQ ID NO: 646

SEQ ID NO: 210754 - DNA, 692 bp, Canis familiaris; identical to SEQ ID NO: 647

SEQ ID NO: 210755 - DNA, 640 bp, Canis familiaris; identical to SEQ ID NO: 648

SEQ ID NO: 210756 - DNA, 678 bp, Canis familiaris; identical to SEQ ID NO: 649

SEQ ID NO: 210757 - DNA, 632 bp, Canis familiaris; identical to SEQ ID NO: 650

SEQ ID NO: 210758 - DNA, 646 bp, Canis familiaris; identical to SEQ ID NO: 651

SEQ ID NO: 210759 - DNA, 636 bp, Canis familiaris; identical to SEQ ID NO: 652

SEQ ID NO: 210760 - DNA, 763 bp, Canis familiaris; identical to SEQ ID NO: 653

SEQ ID NO: 210761 - DNA, 679 bp, Canis familiaris; identical to SEQ ID NO: 654

SEQ ID NO: 210762 - DNA, 637 bp, Canis familiaris; identical to SEQ ID NO: 655

SEQ ID NO: 210763 - DNA, 696 bp, Canis familiaris; identical to SEQ ID NO: 656

SEQ ID NO: 210764 - DNA, 641 bp, Canis familiaris; identical to SEQ ID NO: 657

SEQ ID NO: 210765 - DNA, 702 bp, Canis familiaris; identical to SEQ ID NO: 658

SEQ ID NO: 210766 - DNA, 643 bp, Canis familiaris; identical to SEQ ID NO: 659

SEQ ID NO: 210767 - DNA, 642 bp, Canis familiaris; identical to SEQ ID NO: 660

SEQ ID NO: 210768 - DNA, 644 bp, Canis familiaris; identical to SEQ ID NO: 661

SEQ ID NO: 210769 - DNA, 1400 bp, Canis familiaris
tggaatggggccaacatgccctaccaagcacagcccaccagttacgactatgatgccccactgagcgaggcaggggacctcactgagaagtattttgctctgcgagaagttattcggaagtttgaaaaagtaccagaaggttttatccctccgtctacacccaagtttgcatatggaaaagttgctctgaagaagttaaagacggtggaggaggccctgaatgttctgtgtccgcctgggcccataaacagcctttatcccttgacgtttatccaggtgaaacagtatttcggttttgtgatgtaccgaacaacacttcctcaagactgcagtgaccccacacccctgtcttcacccctcagtggagtccaygaccgygcctatgtctctgtggatggggtgccccagggagtcatggagcgaagtaatgtcatcactctgaacataaccgggaaggctggagccactctggacctgctggtggagaacatgggacgtgtgaactatggcagatatatcaatgattttaagggccttatttctaacctgacccttgggtccagtatcctcacaaactggatgatcttcccgttgaacactgaggatgcagtacgcagccacctgggaggctggcatggccctaacaatggccgccatgataaaacctttgcccaccgctcgtctaactacacgctcycggccttttatatggggaacttctctattcccagtgggatcccaagacttgccccaggaacacckttatccagtttcctggaatggaccaagggtcaggtgtggattaatggctttaacctcggtcgatattggccagcacggggcccccagatgactttgtttgtgccacggcacatcctggtgacatcaaccccaaacaccatcatggtgctggaactggagcacgcgccctgtggtgacagtggcccagaagtgtgcaccgtggagtttgtggacaggccggttatcggtgcccctccaacccctggtcatccccctccagacctgtcccatcgagacttgagactggactatgtctgatgatgaaacactgtgacccgttggagtttcagccttgcacgtacmtcacctatccccctgtgtaatgccaacactcactggaaagttcaactggaaaatagatttagagtgtgcattttctcctgaggtttccaggcagcctggtagtgcccaagcctccactggcaggggccaccatgaatgcatgatgagggcagtggcacacagtttggaatggaagctttgaaggtgttcctgatttttattttggaggaatcatgttgtctttctgttaaataaaatttgtattcaaatgawaaaaaaaaaaaaaaaaaaaaaaaaaaaaaaaaaaaaaaaaaaaa

SEQ ID NO: 210770 - DNA, 778 bp, Canis familiaris; identical to SEQ ID NO: 663

SEQ ID NO: 210771 - DNA, 644 bp, Canis familiaris; identical to SEQ ID NO: 664

SEQ ID NO: 210772 - DNA, 661 bp, Canis familiaris; identical to SEQ ID NO: 665

SEQ ID NO: 210773 - DNA, 682 bp, Canis familiaris; identical to SEQ ID NO: 666

SEQ ID NO: 210774 - DNA, 600 bp, Canis familiaris
caacagttgcagcatgccgctggggatggagagtaaagcaatatcagatgctcagatcactgcctcgtcctacctaagcagtatgcttgccacttggtctccttcccaagcccggctgcacctgcagggcaggactaatgcctggagacctcaggcaaataacccaaaagagtggctgcaagtggacttccggaagaccatgaaagtcacaggaataaccacccagggggtgaaatctctcctcatcagcatgtatgtgaaggagttcctcatctccagtagtcaagatggccataactggactctgtttcttcagaatgrcaaagtcaaggtcttccagggaaaccgggactcctccacgcctgtgcggaacsstctcgaacccccgctggtggctcgctacgtgcgcctgcacccgcagagctgggcgcaccacatcgccctgaggctggaggtcctgggctgcgacacccagcagcccgcctgacccgcgcctctgcggccctgtctcccctgcctccctgccctgtccccgcggcttcccgggccctgacccccacctctccagcctgtccccgtggcctcctgggccctgtgccc

SEQ ID NO: 210775 - DNA, 688 bp, Canis familiaris; identical to SEQ ID NO: 668

SEQ ID NO: 210776 - DNA, 657 bp, Canis familiaris; identical to SEQ ID NO: 669

SEQ ID NO: 210777 - DNA, 661 bp, Canis familiaris; identical to SEQ ID NO: 670

SEQ ID NO: 210778 - DNA, 687 bp, Canis familiaris; identical to SEQ ID NO: 671

SEQ ID NO: 210779 - DNA, 664 bp, Canis familiaris; identical to SEQ ID NO: 672

SEQ ID NO: 210780 - DNA, 647 bp, Canis familiaris; identical to SEQ ID NO: 673

SEQ ID NO: 210781 - DNA, 1400 bp, Canis familiaris
gagggattctgagtatgtctttgtggtggttgatttcctaatcggagtgttaatttttgctaccatcgttggtaacataggttctatgatttccaacatgaatgctgccagggcagaatttcaagcaagaattgatgcaatcaagcaatatatgcatttccgaaatgtaagcaaagatatggaaaagagagttatcaaatggttcgactatctgtggaccaacaaaaaaacagttgatgagaaagaagtcctcaagtatctacctgataagctgagagcagagatcgccatcaacgttcacttagacactttaaaaaaggtgcgcatttttgcggactgtgaagctgggctgttggtggaattggtcttgaaattacaaccccaagtctacagtcctggagattacatttgcaagaaaggggatatcggacgagagatgtacatcatcaaggaaggcaaacttgctgtggtggcagatgatggaatcactcagttcgtggtcttgagtgatggcagctacttcggcgagatcagtatccttaacattaaaggtagcaaagctggcaatcgaagaacagccaatattaaaagtattggctactcagatctgttctgtctctcaaaagatgacctcatggaagctctaactgagtacccagatgccaaaactatgctagaagagaagggaaagcaaatcttgatgaaagatggtctactggatataaatattgcaaatgctggaagtgatcctaaagacctggaagagaaggtcacccgaatggagggatcagtagacctcttgcagacaaggtttgctcggatcctggctgagtatgagtcaatgcagcagaaactgaagcaaagaytaaccaaagttgagagatttctgaaaccaattattgacacagaattttcagctcttgaaggaacgggagatgaaagtaggcccctggactccacacaggactgagaagcyggtcattaacaaggacgtgcctcatgatccttttggtttaggcaactctaaattggaagaagagggagattcagctgggggagtgtttccataaggaaaatgggctttggtgcagtatacaaggcccgcgcacccacttgggaggtactgtgattaacaatcatcgtccttaggatttttcagagtggataatgtgcaaagatatagaatgattaagttgtcagtatctacatttcctgatttttttcatatatgctccttttatgtaatactctataaaagcgaacaagtatccctcactttcaggcattttacattgtggaggagcagctgggaattaccatgtatgtcatgttcaggataccattttaaaaaggattagaatgcaataaagtaaaataaatcctaaaaaaaaaaaaaaaaa

SEQ ID NO: 210782 - DNA, 686 bp, Canis familiaris; identical to SEQ ID NO: 675

SEQ ID NO: 210783 - DNA, 684 bp, Canis familiaris; identical to SEQ ID NO: 676

SEQ ID NO: 210784 - DNA, 657 bp, Canis familiaris; identical to SEQ ID NO: 677

SEQ ID NO: 210785 - DNA, 600 bp, Canis familiaris
tgttttcctaaaatcaggagtgggtgctttggttcccratatacttagatgcagagtagaaggatattttttaacttttgattgctgagtcacttaattagaatttggggagaaactttgttatttatttatttaggtccataagaaaaaaaaatgtcaagagtggggaaaaaaaaaaratctgggttgttttagaacaagatgtgtttcccaagtgatttctctggttctctgtcctttagacagtaagcatctcagccatccagaaccaagaacattccttgaagcattttgggtacaaatagtcaaaaagaacctggttatctgtattttgacattagcttgagaccatttattcttatttgatgtctycmtgaagtgaactagtgtaatggaaaraatgttggaattccaaaaacatgasaaaactacmtccmmmcacctcagattcagaaaagccatggttgtttaaattgaccctaaggacctgatcagccttmgygtgttatatctcttwacgtgctaaaaattacgcagagaagmctttcatttgcatttgcccctgyttcattttatttatgcaagtttttctytttacag

SEQ ID NO: 210786 - DNA, 644 bp, Canis familiaris; identical to SEQ ID NO: 679

SEQ ID NO: 210787 - DNA, 667 bp, Canis familiaris; identical to SEQ ID NO: 680

SEQ ID NO: 210788 - DNA, 642 bp, Canis familiaris; identical to SEQ ID NO: 681

SEQ ID NO: 210789 - DNA, 647 bp, Canis familiaris; identical to SEQ ID NO: 682

SEQ ID NO: 210790 - DNA, 671 bp, Canis familiaris; identical to SEQ ID NO: 683

SEQ ID NO: 210791 - DNA, 674 bp, Canis familiaris; identical to SEQ ID NO: 684

SEQ ID NO: 210792 - DNA, 567 bp, Canis familiaris; identical to SEQ ID NO: 685

SEQ ID NO: 210793 - DNA, 670 bp, Canis familiaris; identical to SEQ ID NO: 686

SEQ ID NO: 210794 - DNA, 651 bp, Canis familiaris; identical to SEQ ID NO: 687

SEQ ID NO: 210795 - DNA, 671 bp, Canis familiaris; identical to SEQ ID NO: 688

SEQ ID NO: 210796 - DNA, 604 bp, Canis familiaris; identical to SEQ ID NO: 689

SEQ ID NO: 210797 - DNA, 647 bp, Canis familiaris; identical to SEQ ID NO: 690

SEQ ID NO: 210798 - DNA, 611 bp, Canis familiaris; identical to SEQ ID NO: 691

SEQ ID NO: 210799 - DNA, 706 bp, Canis familiaris; identical to SEQ ID NO: 692

SEQ ID NO: 210800 - DNA, 648 bp, Canis familiaris; identical to SEQ ID NO: 693

SEQ ID NO: 210801 - DNA, 651 bp, Canis familiaris; identical to SEQ ID NO: 694

SEQ ID NO: 210802 - DNA, 692 bp, Canis familiaris; identical to SEQ ID NO: 695

SEQ ID NO: 210803 - DNA, 600 bp, Canis familiaris
ctgcagttcgagctcctgttcttccggaacacatccctgaatcatgctcagcagtatcgctggtaagaagagtaagatggggcagcaggatgggcgggaggctgggagggccccttgatgatggggctggcagcagctggggccatcctgctgagtaggggcccagtggggcttccttctcctctctgcccccttcaaaggtaccagatgctctaccaggctggcgtctttgtttcccgttcttctctccattgctgtcgcatccgtttcacatgggtcctggccctgctgcaggtaccaagcctggctctccctccattccctccttggctcccagctacccaagaccccaggcctccttccctctgcaggaagtgtttcttgcccactgtcaggttgtctggggaacagaaggccagcaggactccagatctgtataaaatgtgtggtcttgggaaacctggcaaacatggatgcaaatcccaccttctgttctctgcagttgtgtgacttagggcaggtctctaaaccagtccaagatgagagttcctcatctctgaatcaggtgtggccaacatctgcttctctaggtagttataa

SEQ ID NO: 210804 - DNA, 666 bp, Canis familiaris; identical to SEQ ID NO: 697

SEQ ID NO: 210805 - DNA, 653 bp, Canis familiaris; identical to SEQ ID NO: 698

SEQ ID NO: 210806 - DNA, 721 bp, Canis familiaris; identical to SEQ ID NO: 699
  misc_feature (35)..(35): n is a, c, g, or t

SEQ ID NO: 210807 - DNA, 649 bp, Canis familiaris; identical to SEQ ID NO: 700

SEQ ID NO: 210808 - DNA, 694 bp, Canis familiaris; identical to SEQ ID NO: 701

SEQ ID NO: 210809 - DNA, 652 bp, Canis familiaris; identical to SEQ ID NO: 702

SEQ ID NO: 210810 - DNA, 669 bp, Canis familiaris; identical to SEQ ID NO: 703

SEQ ID NO: 210811 - DNA, 669 bp, Canis familiaris; identical to SEQ ID NO: 704

SEQ ID NO: 210812 - DNA, 653 bp, Canis familiaris; identical to SEQ ID NO: 705

SEQ ID NO: 210813 - DNA, 677 bp, Canis familiaris; identical to SEQ ID NO: 706

SEQ ID NO: 210814 - DNA, 651 bp, Canis familiaris; identical to SEQ ID NO: 707

SEQ ID NO: 210815 - DNA, 656 bp, Canis familiaris; identical to SEQ ID NO: 708

SEQ ID NO: 210816 - DNA, 652 bp, Canis familiaris; identical to SEQ ID NO: 709

SEQ ID NO: 210817 - DNA, 669 bp, Canis familiaris; identical to SEQ ID NO: 710

SEQ ID NO: 210818 - DNA, 654 bp, Canis familiaris; identical to SEQ ID NO: 711

SEQ ID NO: 210819 - DNA, 654 bp, Canis familiaris; identical to SEQ ID NO: 712

SEQ ID NO: 210820 - DNA, 673 bp, Canis familiaris; identical to SEQ ID NO: 713

SEQ ID NO: 210821 - DNA, 673 bp, Canis familiaris; identical to SEQ ID NO: 714

SEQ ID NO: 210822 - DNA, 658 bp, Canis familiaris; identical to SEQ ID NO: 715

SEQ ID NO: 210823 - DNA, 657 bp, Canis familiaris; identical to SEQ ID NO: 716

SEQ ID NO: 210824 - DNA, 770 bp, Canis familiaris; identical to SEQ ID NO: 717

SEQ ID NO: 210825 - DNA, 841 bp, Canis familiaris; identical to SEQ ID NO: 718

SEQ ID NO: 210826 - DNA, 877 bp, Canis familiaris; identical to SEQ ID NO: 719

SEQ ID NO: 210827 - DNA, 675 bp, Canis familiaris; identical to SEQ ID NO: 720

SEQ ID NO: 210828 - DNA, 720 bp, Canis familiaris; identical to SEQ ID NO: 721

SEQ ID NO: 210829 - DNA, 690 bp, Canis familiaris; identical to SEQ ID NO: 722
  misc_feature (63)..(63): n is a, c, g, or t

SEQ ID NO: 210830 - DNA, 722 bp, Canis familiaris; identical to SEQ ID NO: 723

SEQ ID NO: 210831 - DNA, 722 bp, Canis familiaris; identical to SEQ ID NO: 724

SEQ ID NO: 210832 - DNA, 705 bp, Canis familiaris; identical to SEQ ID NO: 725

SEQ ID NO: 210833 - DNA, 665 bp, Canis familiaris; identical to SEQ ID NO: 726

SEQ ID NO: 210834 - DNA, 666 bp, Canis familiaris; identical to SEQ ID NO: 727

SEQ ID NO: 210835 - DNA, 644 bp, Canis familiaris; identical to SEQ ID NO: 728

SEQ ID NO: 210836 - DNA, 690 bp, Canis familiaris; identical to SEQ ID NO: 729

SEQ ID NO: 210837 - DNA, 1400 bp, Canis familiaris
cttcagccagctgcaaggccgcttcggaaacgtgttcagcctggagctggcctggacgccggtggtcgtgctcaacggcctggaggcggtgcgcgaggccctggtgcaccgcagcgaggacactgccgaccgcccacctatgccgatctatgaccacctgggtttggggccagaatcccaagggttgttcctggcgcgctacgggcgcgcgtggcgcgagcagcggcgcttctcgctgtccaccctgcgcaacttcggcctgggcaggaagtccctggagcagtgggtgaccgaggaggcctcgtgcctctgcgcggccttcgccgagcaggcgggccgccccttcggccccggcgcgctgctgaacaaggcggtgagcaacgtgatctcgtcgctcacctacgggcgccgcttcgagtacgacgacccgcggctgctccagctgctggagctcacccagcaggcgctgaagcaggactccggcttcctgcgtgaggccctgaactccatccccgtgctcctgcacatcccgggactggccagcaaggtcttctccgcgcagaaggccatcataaccctgacaaatgaaatgatccaggagcacaggaagacccgggaccccacccagccaccccgacacctgatcgacgccttcgtggatgagatagaaaaagccaaagggaaccccaagaccagcttcaatgaggagaacctgtgcatggtgacctctgacctgttcatcgctgggatggtgtccacctcaatcacgctgacctgggccctcctgctcatgatcctgcacccggacgtgcagcgacgtgtccagcaggagatagatgaggtgatagggcgggagcagctaccagagatgggagaccagacccgtatgcccttcaccgtggccgtgatccatgaggtgcagcgttttggggacatcgtcccactcggtgtgccccacatgacgtcccgagacactgaagtgcagggcttcctcatccccaaggggacgacactcatcaccaacctgtcgtcagtgctaaaggacgagaaggtctggaagaagcccttccgcttctaccccgagcacttcctggacgcccagggccacttcgtcaagcatgaggccttcatgcccttctctgcaggccgccgcgtctgcctcggggagcccctggcccgcatggagctcttcctcttcttcacctgcctcctgcagcgcttcagcttttcagtgcctgcggggcagccccggcccagcgaccacggggtcttcaccttcctgaaggttccagcccccttccagctctgtgtggagcctcgctaggggcaggaaccaccaccccccgccgcccggctcctcagcaggggcccgaggtacaataaaccagtttggtggctcc

SEQ ID NO: 210838 - DNA, 1072 bp, Canis familiaris; identical to SEQ ID NO: 731

SEQ ID NO: 210839 - DNA, 1400 bp, Canis familiaris
tcagatcccgtgacctgtaacgccacacacatgaccctcaccataccagagtttcctgggaaactacagtctgtgagatttgaaaacacgaactttsstgtaagccagctgcacaaccatgggattgataaagaagaattaaacggcttgaggttacacttcagcaaatctcttctcaaaatgaactcctctgaaaaatgcctacyctatcagttctacttagcatctctcargctgacctttgcctttgaacgggacacggtttccacagtggtttatcctgagtgtgtttgtgagccaccagttactatagttacaggtgacctgtgtacccaggatgggtttatggatgtcaaggtctacagccaccaaacaaaaccagctctaaacttggataccctcrgagtgggagactcctcctgccaacctactttcaaggctccatcacaagggttracactgtttcacatccccctaaatggatgtggaacaagacttaagttcaaaggtgacacagtcatctatgaaaatgaaatacatgctctctggacagatctccctccaagcacaatttccagagatagtgaattcagaatgactgtgaagtgccattacagcagagatgacctgctgataaataccaatgtccaaagtcttcctcctcccgtggcctcagtgaggcctggtccacttgccttaatcctgcaaacctacccagataaatcctatttgcgaccctatggggataaggagtatcctgtggtgagatacctccgccaaccaatttacctggaagtgaaagtcctaaatagggctgaccccaacatcaagctggtcttagatgattgctgggcaacacccaccatggacccagcctcactcccccagtggaatattgtcatggatggctgtgaatacaatctggacaactacagaacgaccttccatccagttggctcctctgtgacctaccctactcactatcrgaggtttgatgtgaagacctttgcctttatakcagaggcccaagtgcttkctagcctggtctacttccactgcaccgcattaatctgcaatcgactgtctcctgactcccctctgtgttctgtgacttgccctgtatcatccaggcacaggcgagccacaggcagtactgmagaagagaagatgatagtaagtctcccgggacccatcctcctgttggcagacagctcttcactcagagatggtgtggactcaaaagggcacagggctgctggatatgttgcttttaaaactgtagtggctgtggctgccttagcaggccttgtggctgctctaggtctcatcatctacctgcgtaagaaaagaaccatggtgttaaatcactaaggattttcaaataaagtgtttgttaaagt

SEQ ID NO: 210840 - DNA, 1320 bp, Canis familiaris; identical to SEQ ID NO: 733

SEQ ID NO: 210841 - DNA, 750 bp, Canis familiaris; identical to SEQ ID NO: 734

SEQ ID NO: 210842 - DNA, 750 bp, Canis familiaris; identical to SEQ ID NO: 735

SEQ ID NO: 210843 - DNA, 673 bp, Canis familiaris; identical to SEQ ID NO: 736

SEQ ID NO: 210844 - DNA, 270 bp, Canis familiaris; identical to SEQ ID NO: 737

SEQ ID NO: 210845 - DNA, 705 bp, Canis familiaris; identical to SEQ ID NO: 738

SEQ ID NO: 210846 - DNA, 1183 bp, Canis familiaris; identical to SEQ ID NO: 739

SEQ ID NO: 210847 - DNA, 718 bp, Canis familiaris; identical to SEQ ID NO: 740

SEQ ID NO: 210848 - DNA, 679 bp, Canis familiaris; identical to SEQ ID NO: 741

SEQ ID NO: 210849 - DNA, 941 bp, Canis familiaris; identical to SEQ ID NO: 742

SEQ ID NO: 210850 - DNA, 944 bp, Canis familiaris; identical to SEQ ID NO: 743
  misc_feature (422)..(422): n is a, c, g, or t
  misc_feature (627)..(627): n is a, c, g, or t
  misc_feature (693)..(693): n is a, c, g, or t
  misc_feature (877)..(877): n is a, c, g, or t

SEQ ID NO: 210851 - DNA, 685 bp, Canis familiaris; identical to SEQ ID NO: 744

SEQ ID NO: 210852 - DNA, 595 bp, Canis familiaris; identical to SEQ ID NO: 745

SEQ ID NO: 210853 - DNA, 678 bp, Canis familiaris; identical to SEQ ID NO: 746

SEQ ID NO: 210854 - DNA, 692 bp, Canis familiaris; identical to SEQ ID NO: 747

SEQ ID NO: 210855 - DNA, 680 bp, Canis familiaris; identical to SEQ ID NO: 748

SEQ ID NO: 210856 - DNA, 1400 bp, Canis familiaris
ggccgtaggcatggtgaaggaagttgtccggacagacagcctgaaggggcggcggggtcggctcccttcgaagcccaagcagcccccggacgcctcccctgccaacctcctcacgtccctggtcagggcacacctggactccgggcccagcacagccaaactggactactccaagttccaggagctggtactgccccacttcgggaaggaagatgccggggacgtgcagcagttctacgacctgctttcgggttccctggaggtcatccgcaagtgggccgagaagatccccggctttgccgagctgtccccgggtgaccaggacctgctgctggagtcggccttcctggagctcttcatcctccgcctggcctaccgctcgaagccggccgaggggaagctcatcttctgctcgggcctggtgctccaccggctgcagtgcgcccgcggctttggcgactggatcgacagcattctggccttctctcggtccctgcacggcctggtggtggacgtccctgccttcgcctgcctctcggcgctcgtcctcatcacagaccggcacgggctgcaagagccaaggcgggtggaggagctgcaaaatcgcatcgccagctgcctgaaggagcacgtctcggccgtggcgggcgaaccgcagccggccagctgcctgtcacgcctgctgggcaagctccccgagctgcggaccctgtgcacccagggcttgcaacgcatcttctacctcaagctggaggacttggtgccccctccgcccattgtcgacaagatctttatggacacactgcccttctgaccccagcccaggaacacgcgtgcgcsgtgaatgcacgctcctacaccaccccacgtgcctttagcccatggcccacggaccctcagagcacccccagcctgggcttgagccgcagaccagccggcctccgcccttgtactgggtggttgkcagggagctcacgccctgggggagggggatgcattcatgggggtgacccctactacttgtcttagcccccagcccagccctggccttcatgtttttgtaagataaaccgtttttaacacacaccgccgtgctgtaaataagccagatgctgctgtaaatataggaaggaagaggccgagatgggagtgggggctcggagggaggggcggcccccaccagcccgggcaagcctctcccgcctccttgcacctgctctctcttcccaccctctttccacatgtacataaccttactctacaaagaagacaaatgacagattctgacatttatatttgtgtattttcctggatttatagtatgtgacttttctgattaatatatttaatatattgaataaaaaataggcctgtagctgaaaaaaaaaaaaaaaaaaaaa

SEQ ID NO: 210857 - DNA, 697 bp, Canis familiaris; identical to SEQ ID NO: 750

SEQ ID NO: 210858 - DNA, 694 bp, Canis familiaris; identical to SEQ ID NO: 751

SEQ ID NO: 210859 - DNA, 1147 bp, Canis familiaris; identical to SEQ ID NO: 752

SEQ ID NO: 210860 - DNA, 678 bp, Canis familiaris; identical to SEQ ID NO: 753
  misc_feature (97)..(97): n is a, c, g, or t

SEQ ID NO: 210861 - DNA, 642 bp, Canis familiaris; identical to SEQ ID NO: 754

SEQ ID NO: 210862 - DNA, 681 bp, Canis familiaris; identical to SEQ ID NO: 755

SEQ ID NO: 210863 - DNA, 681 bp, Canis familiaris; identical to SEQ ID NO: 756

SEQ ID NO: 210864 - DNA, 699 bp, Canis familiaris; identical to SEQ ID NO: 757

SEQ ID NO: 210865 - DNA, 800 bp, Canis familiaris; identical to SEQ ID NO: 758

SEQ ID NO: 210866 - DNA, 634 bp, Canis familiaris; identical to SEQ ID NO: 759

SEQ ID NO: 210867 - DNA, 634 bp, Canis familiaris; identical to SEQ ID NO: 760

SEQ ID NO: 210868 - DNA, 1112 bp, Canis familiaris; identical to SEQ ID NO: 761

SEQ ID NO: 210869 - DNA, 687 bp, Canis familiaris; identical to SEQ ID NO: 762

SEQ ID NO: 210870 - DNA, 825 bp, Canis familiaris; identical to SEQ ID NO: 763
  misc_feature (354)..(354): n is a, c, g, or t

SEQ ID NO: 210871 - DNA, 688 bp, Canis familiaris; identical to SEQ ID NO: 764

SEQ ID NO: 210872 - DNA, 488 bp, Canis familiaris; identical to SEQ ID NO: 765

SEQ ID NO: 210873 - DNA, 1001 bp, Canis familiaris; identical to SEQ ID NO: 766
  misc_feature (210)..(211): n is a, c, g, or t
  misc_feature (277)..(277): n is a, c, g, or t

SEQ ID NO: 210874 - DNA, 756 bp, Canis familiaris; identical to SEQ ID NO: 767

SEQ ID NO: 210875 - DNA, 881 bp, Canis familiaris; identical to SEQ ID NO: 768

SEQ ID NO: 210876 - DNA, 1400 bp, Canis familiaris
caaactcttttgcttgggctgaatatttagtktaattacatctcasctttragggctcctgtggcaaatccccggattaaaaggttccttggctgtgaaaatacatrasctaaaccatgaaggcaactatcatcttcctcctgcttgcacaagtttcctgggctgggccgttccaacagagaggcttatttgactttatgctagaagatgaggcttccgggataggcccggaggaccgtgcacctgacatgcctgacctcgagcttctgggacctgtgtgtcccttccgctgtcagtgccatctccgagtggtccagctgttccgacctgggtctggacaaagtaccaaaagatcttccccctgacactacgctgctcgacttgcaaaacaacaaaatcaccgaaatcaaagatggagacttcaagaacctcaagaacctgcataccttgattctkgtaaacaacaaaattagcaaaatcagccctggagcatttacacctttgttgaaattggaacgactttatctgtccaagaatcatctgaaggaattgccagaaaaaatgcccaaaactcttcrggagctgcgkgcccatgagaatgagatcaccmaagttcgaaaagctgtgtkcaatggactgraccagatgatcktygtagagctgggcaccdatccsckgaagagttcagggaytkaaaatggagccttccagggaatgaagaagctctcctatatccgcatkgctgataccrrtatrrctaccatccctcaagktcttcctccttcccttactgrattacatcktgaaggcracvwaatcaccaaggttgatgcatctagcctgaaaggactgaataatttggctaagttgggactgagttttaacagcatctccgctgttgacaatggcactctagccwacactcctcatctgagggagcttcacttggacamcaataagctcatcagagtacccggtgggctggcggagcataagtacatccaggttgtctaccttcataacaacaatatatctkcmgtcggatytaatgacttctgcccacctggatacaacaccmaaaaggcttcttattcaggtgtgagccttttcagcaacccagtgcagtactgggagatccagccatccaccttccggtgtgtctacgtgcgctctgccatycagcttggaaattataaataattcccaagaragccctcgtttttataacctggcaaaatcccattaatatcattgctcaaaaaaaaaaaaaaaarraamwaartacgggaaacttagctgcaatgtgaatgttttccccctaatttataatactaaaccaaattgcatttaaaatgccaaaaaaaaaaaattttggccgccaaaaaaaaaaaaaaaaaaaa

SEQ ID NO: 210877 - DNA, 1400 bp, Canis familiaris
tcacattgcagctaagtttcccgtayttwkttyyttttttttttttttttgagcaatgatattaatgggattttgccaggttataaaaacgagggctytcttgggaattatttataatttccaagctgratggcagagcgcacgtagacacaccggaaggtggatggctggatctcccagtactgcactgggttgctgaaaaggctcacacctgaataagaagccttttkggtgttgtatccaggtgggcagaagtcattaratccgackgmagatatattgttgttatgaaggtagacaacctggatgtacttatgctccgccagcccaccgggtactctgatgagcttattgktgtccaagtgaagctccctcagatgaggagtgtwggctagagtgccattgtcaacagcggagatgctgttaaaactcagtcccaacttagccaaattattcagtcctttcaggctagatgcatcaaccttggtgattwbgtygccttcamgatgtaatycagtaagggaaggaggaagamcttgagggatggtagyyatayyggtatcagcmatgcggatataggagagcttcttcattccctggaaggctccattttmartccctgaactcttcmgsggathggtgcccagctctacramgatcatctggtycagtccattgmacacagcttttcgaacttkggtgatctcattctcatgggcmcgcagctccygaagagttttgggcattttttctggcaattccttcagatgattcttggacagataaagtcgttccaatttcaacaaaggtgtaaatgctccagggctgattttgctaattttgttgtttacmagaatcaaggtatgcaggttcttgaggttcttgaagtctccatctttgatttcggtgattttgttgttttgcaagtcgagcagcgtagtgtcagggggaagatcttttggtactttgtccagacccaggtcggaacagctggaccactcggagatggcactgacagcggaagggacacacaggtcccagaagctcgaggtcaggcatgtcaggtgcacggtcctccgggcctatcccggaagcctcatcttctagcataaagtcaaataagcctctctgttggaacggcccagcccaggaaacttgtgcaagcaggaggaagatgatagttgccttcatggtttagstyatgtattttcacagccaaggaaccttttaatccggggatttgccacaggagccctyaaagstgagatgtaattamactaaatattcagcccaagcaaaagagtttgcaggtgtggaaaggaggagggggtaggtgctgytytgtgamtgtyamtaggttgagaacctcctgsttytactccatagcacagttaaaaaaa

SEQ ID NO: 210878 - DNA, 789 bp, Canis familiaris; identical to SEQ ID NO: 771

SEQ ID NO: 210879 - DNA, 1182 bp, Canis familiaris; identical to SEQ ID NO: 772
  misc_feature (137)..(137): n is a, c, g, or t
  misc_feature (158)..(158): n is a, c, g, or t
  misc_feature (167)..(167): n is a, c, g, or t
  misc_feature (183)..(190): n is a, c, g, or t

SEQ ID NO: 210880 - DNA, 1228 bp, Canis familiaris; identical to SEQ ID NO: 773

SEQ ID NO: 210881 - DNA, 813 bp, Canis familiaris; identical to SEQ ID NO: 774
  misc_feature (285)..(285): n is a, c, g, or t
  misc_feature (390)..(390): n is a, c, g, or t

SEQ ID NO: 210882 - DNA, 969 bp, Canis familiaris; identical to SEQ ID NO: 775
  misc_feature (109)..(110): n is a, c, g, or t

SEQ ID NO: 210883 - DNA, 1166 bp, Canis familiaris; identical to SEQ ID NO: 776

SEQ ID NO: 210884 - DNA, 689 bp, Canis familiaris; identical to SEQ ID NO: 777

SEQ ID NO: 210885 - DNA, 701 bp, Canis familiaris; identical to SEQ ID NO: 778

SEQ ID NO: 210886 - DNA, 693 bp, Canis familiaris; identical to SEQ ID NO: 779

SEQ ID NO: 210887 - DNA, 693 bp, Canis familiaris; identical to SEQ ID NO: 780

SEQ ID NO: 210888 - DNA, 229 bp, Canis familiaris; identical to SEQ ID NO: 781

SEQ ID NO: 210889 - DNA, 706 bp, Canis familiaris; identical to SEQ ID NO: 782

SEQ ID NO: 210890 - DNA, 689 bp, Canis familiaris; identical to SEQ ID NO: 783

SEQ ID NO: 210891 - DNA, 600 bp, Canis familiaris
ccggagcaggtggctgtttgaggaatgctcccagggcatgggagctcccaagcagacgcagatgttttcatcacttcctccactgtgttgacactgtctccttcccagttgtcccagatccccagctttctcctctgctatgcattttcttcacagcgcacgttgcagtccgtcactgaaaatgattataagctccgcatagtgttaagctttattgtgattaagtgtatgtttcttccttctttaagcagacccacacctttccagggtcaaagtacaggataagatactgtctttcatttttatccatttcttttgctctgtgtcaagacttgaaaagtctcagccagaggtgagccaattcagaatctgtaattgaacacaggcttaaagtatttatgggaggagtggcataacagcatgaattctgaatttttttttttttttagctgctaaactttttaagtcttcatttgcagttcatgtaacatttgtgtcttaaattacatgataaagcagtcctgttaaaaaattctgggggggtatgtggcttgtagaattcttttaagatgtgatcttagattttttttttcggaattc

SEQ ID NO: 210892 - DNA, 695 bp, Canis familiaris; identical to SEQ ID NO: 785

SEQ ID NO: 210893 - DNA, 713 bp, Canis familiaris; identical to SEQ ID NO: 786

SEQ ID NO: 210894 - DNA, 645 bp, Canis familiaris; identical to SEQ ID NO: 787

SEQ ID NO: 210895 - DNA, 682 bp, Canis familiaris; identical to SEQ ID NO: 788

SEQ ID NO: 210896 - DNA, 1400 bp, Canis familiaris
tgttaacaggtatgaacctgacttgatttggtctgatggrgagtggraatgtcctgatacttactggaactctacagagtttctttcttggctctacaatgatagtccagtcaaggrtcacgtagtggtaaatgaccggtggggtcagaactgttcctgtcaccatggaggatactacaactgtcaagataaatacaagccagagagcttgccagaccwyaagtgggaaatgtgtacctccatagacaaggtctcctggggctatcgtcgtaacatggtgatgtcggacgttgcaagtgaatgtgaaatcatctcggaactggttcagacagtgagcttgggaggcaactacctcctcaacattggaccaactaaagatggactgattgtccccatcttccaagaaaggcttctttccattgggaagtggctaagcatcaatggggaggctatctatgcctctaaaccgtggagggtacaactggaaaagaacacgacktctgtgtggtatacctcaagaggaatgactgtttatgccattttcctgcgctggccagaaaatggagtcttaagccttaaatccccagtaactacctcgactacacagataacgatgctggggatccagaaagatctgaagtggtccacggaaccagaaggtctsctcatttatctgccccagttatcactctttactctgccagttgagtttggttggactataaagctgacaggagtggaatgattgttggagttcaggaggaactgcctcctgttggctgctttggttttcctcttatagcaccatcgttgtwataaactacttctctattcagagatggcttttccracacaktktaatcaaaggaactgagtgcattatactgaygtctcaatggatcagagatctgagatccmttgctagcatacctctctctgatcagcaagaggcactagctggttaagctctgcgttcatccttctattcctaacttgggraattatctaccccagaaacttcccyccattccttgtgtwtgaaacctatttccttactcaatgacttcagataaagaatgagccmagtcaccccmttgcctatggaagaaggtgaagaggatctggcmatctcaaccatacrctgtgtgtttagcatcagttgtcaccagcacccctccmagaggaggagatcctggaagggaagcmagaggctagcmagggctgccmatggtcagctctttggaagtttccatagcmaactaggtgctcagaaattcagtctgtttacagtgataggatgaagaaaatgaatgtgattctgccctgctttttaaaatataatcaaataaataaatttttakgtcaaatcatttctatcmaaaaaaaaaaaaaaaaaaaaa

SEQ ID NO: 210897 - DNA, 600 bp, Canis familiaris
cgccgccgccgctgccgctgccgctgctgctgctgctgctgctcggcgcggcgttggtgcgcgcggccgccgcctccgcgccgctacaccccggactggcagagtctggactcgcggccgctgccggactggttcgacaaggccaagttcggggtgttcgtgcactggggcgwgttcgcggtgccggcctggggcagcgagtggttctggtggcactggaagggcgaggggctgccgcagtacgagcagttcatgagcgagaactacccgcccggcttcagctacgccgacttcgggccgcagttcacggcgcgcttcttccaccccgacacctgggccgacctcttccaggcggcgggggcccggtgagtgcccgggtcsggccggcgggaggcgcggggcggggaggcgggcccggcccaggagccccccgaggggtgcgcactggacgtggcgcacctggcctcgcggagggggcgcgtctgctcggggcggggggggcgggggggarscccgtgtctaggcctgtgtatggagacgatcgagctgcgccgacccccggccccttaccaggtcaacaagacaatcaggattccagaa

SEQ ID NO: 210898 - DNA, 696 bp, Canis familiaris; identical to SEQ ID NO: 791

SEQ ID NO: 210899 - DNA, 683 bp, Canis familiaris; identical to SEQ ID NO: 792

SEQ ID NO: 210900 - DNA, 696 bp, Canis familiaris; identical to SEQ ID NO: 793

SEQ ID NO: 210901 - DNA, 702 bp, Canis familiaris; identical to SEQ ID NO: 794

SEQ ID NO: 210902 - DNA, 698 bp, Canis familiaris; identical to SEQ ID NO: 795

SEQ ID NO: 210903 - DNA, 809 bp, Canis familiaris; identical to SEQ ID NO: 796

SEQ ID NO: 210904 - DNA, 716 bp, Canis familiaris; identical to SEQ ID NO: 797

SEQ ID NO: 210905 - DNA, 740 bp, Canis familiaris; identical to SEQ ID NO: 798

SEQ ID NO: 210906 - DNA, 736 bp, Canis familiaris; identical to SEQ ID NO: 799

SEQ ID NO: 210907 - DNA, 798 bp, Canis familiaris; identical to SEQ ID NO: 800

SEQ ID NO: 210908 - DNA, 1297 bp, Canis familiaris; identical to SEQ ID NO: 801
  misc_feature (52)..(53): n is a, c, g, or t

SEQ ID NO: 210909 - DNA, 994 bp, Canis familiaris; identical to SEQ ID NO: 802
  misc_feature (95)..(95): n is a, c, g, or t
  misc_feature (98)..(99): n is a, c, g, or t

SEQ ID NO: 210910 - DNA, 618 bp, Canis familiaris; identical to SEQ ID NO: 803

SEQ ID NO: 210911 - DNA, 626 bp, Canis familiaris; identical to SEQ ID NO: 804

SEQ ID NO: 210912 - DNA, 631 bp, Canis familiaris; identical to SEQ ID NO: 805

SEQ ID NO: 210913 - DNA, 618 bp, Canis familiaris; identical to SEQ ID NO: 806

SEQ ID NO: 210914 - DNA, 509 bp, Canis familiaris; identical to SEQ ID NO: 807

SEQ ID NO: 210915 - DNA, 738 bp, Canis familiaris; identical to SEQ ID NO: 808

SEQ ID NO: 210916 - DNA, 585 bp, Canis familiaris; identical to SEQ ID NO: 809

SEQ ID NO: 210917 - DNA, 203 bp, Canis familiaris; identical to SEQ ID NO: 810

SEQ ID NO: 210918 - DNA, 825 bp, Canis familiaris; identical to SEQ ID NO: 811

SEQ ID NO: 210919 - DNA, 1400 bp, Canis familiaris
gtccgttgatatctgtgtactccgaaaagggggaatcatccggcaaaaatgttaccttgcccgctgtgtttaaggctcccattcgacccgatatcgtgaactttgttcacaccaacttgcgcaaaaacaacagacagccatatgctgtcagtgaattagcaggtcatcaaaccagtgctgaatcttggggtactggcagagccgtggctcgaattccccgagttcgaggcggtgggactcaccgttctggccagggtgcttttggaaatatgtgtcgtggaggccgcatgtttgcaccaaccaaaacctggcgccgttggcaccgcagagtgaacacaacacaaaagcgatacgccatctgttctgccctggcatgcctcagcttaccagcactggtcatgtctaaaggtcatcgtattgaggaagttcctgaacttcctttggtggttgaagataaagttgaaggctacaagaagaccaaggaggcagttttgcttcttaagaaacttaaagcctggaatgatatcaagaaggtctatgcctctcagcgaatgagagctggcaaaggcaaaatgagaaaccgtcgtcgtatccagcgcaggggaccctgcwtcatctacaatgaagacaacggtatcatcaaggccttcarraaacatcctggrattactttacttaaatgtaaagcaagctgaacattctgaaactkgctcctggtgggcatgtgggacgtytctgcatttgractgwaagtgctttycgcmagttagacgatctgtatgscacttggcgtwrrsstgcctccyycaagagtwactacramcttcccakgcataagatgcktaatacrgacctcagcagaatcttgaraagcccagagatccmaagagccctccgrgcaccacgcaagaagattcatcgtagagtcctgaagaagaatccmctgaagracctaagaatcatgttgaagctaaacccgtatgcmaagaccatgcgccggaacaccattcttcgccaggccmagaatcacmamytccggatggataaggcrgcagcagctttagaagccmaatcggaggagaagggagttccaggcaagaagcccacggtagggaagaaaggaaagaaaactgttggtgtgaaaaagccgaagaaacctgtggtaggaammaaggctgcagctaccmagaaaccagcagctgacmagaaacctgsagaaaagaaacctaccmcggaagagaagaagcccgctgcctaaaaacttatatttgtttattccataaaactcaaatcattttggacagctaattytaaatmaagacctgatcaaagacarwraraaamrwaaaaaaaaaraaaaaaaawaaaaaaaaaaaaaaaaaaaaaaaaaaaaaaaaagg

SEQ ID NO: 210920 - DNA, 721 bp, Canis familiaris; identical to SEQ ID NO: 813

SEQ ID NO: 210921 - DNA, 674 bp, Canis familiaris; identical to SEQ ID NO: 814

SEQ ID NO: 210922 - DNA, 647 bp, Canis familiaris; identical to SEQ ID NO: 815

SEQ ID NO: 210923 - DNA, 591 bp, Canis familiaris; identical to SEQ ID NO: 816

SEQ ID NO: 210924 - DNA, 576 bp, Canis familiaris; identical to SEQ ID NO: 817

SEQ ID NO: 210925 - DNA, 701 bp, Canis familiaris; identical to SEQ ID NO: 818
  misc_feature (117)..(118): n is a, c, g, or t

SEQ ID NO: 210926 - DNA, 514 bp, Canis familiaris; identical to SEQ ID NO: 819

SEQ ID NO: 210927 - DNA, 549 bp, Canis familiaris; identical to SEQ ID NO: 820

SEQ ID NO: 210928 - DNA, 462 bp, Canis familiaris; identical to SEQ ID NO: 821

SEQ ID NO: 210929 - DNA, 401 bp, Canis familiaris; identical to SEQ ID NO: 822

SEQ ID NO: 210930 - DNA, 636 bp, Canis familiaris; identical to SEQ ID NO: 823

SEQ ID NO: 210931 - DNA, 586 bp, Canis familiaris; identical to SEQ ID NO: 824
  misc_feature (567)..(567): n is a, c, g, or t

SEQ ID NO: 210932 - DNA, 600 bp, Canis familiaris
cacgaggagacaccgcccaccaccagcagcgactcggaggaagaacaagaggacgaagaagaaattgatgttgtttctgtggaaaaaaggcaggcccctgccrmamgrkccgaatcggggtccccctctgctggaggccacagcaaacctcctcacagcccrctggtccttaagagatgccatgtgtccacccatcagcacaactacgcggcacccccctccaccaggaaggactatcccgccgccaagagggcgaggttggacagtggtagagtcctgaaacagatcagcaacaaccgcaaatgtgccagccccaggtcttcggacacggaggagaatgacaagaggcgaacacacaacgtcttggagcgccagaggaggaacgagctgaaacggagcttctttgccctgcgtgatcagatcccggagttggaaaacaatgaaaaggcccccaaggtagtgatccttaaaaaagccaccgcgtacatcctgtccgtccaagccgaggagcaaaagctcctttccgaaaaggacttgttgcggaagcggcgagaacagttgaaacacaaactggaacagctaaggaactctggtgcctaa

SEQ ID NO: 210933 - DNA, 253 bp, Canis familiaris; identical to SEQ ID NO: 826

SEQ ID NO: 210934 - DNA, 632 bp, Canis familiaris; identical to SEQ ID NO: 827

SEQ ID NO: 210935 - DNA, 600 bp, Canis familiaris
tgccatatgtcttttctgagtgaattcatggaattgatgttctggtaaatcacctcaatgtgtttaatattgtatttttttagaatcatgacttaatgacgtacaatggttatcctgtcttggttctcattaccttttatatcaacaagctgctcatctttaagaactcactaggcagaaatagataactcaatccttcatcaaatcatctattactactcataaaataatgttcctggaattattggctttattaattaggttatttacccattactgtgaccctggtttactacaagggcttaatatcacacttctttttctagtgagtttggtaggataagaattcttttatgttactcactggtgatgtttcctaattttatgaatatcacagtatttgttttaaagtttttatttatttgagagcagtagagatcacagaaagagaaggaggggagaagaagtctcatcactgagtggagagcctgatgtagggctccaactcaggactctgagataattacctgagccaaaggcagtcacttaaccaactgagccacccaggtgcccccgaatatcataatctttggtggatcc

SEQ ID NO: 210936 - DNA, 600 bp, Canis familiaris
gatggccctgccctgctccttctcggtggccctggtgctgctcagctgccactccctgtgctgtctggcttgccacctgcccgacacccacggcctgcgcaactggagggtcctgacgctcctgggacagatgaggagactctccgccggctcttgtgaccactacaccaatgactttgccttccccaaggagctgtttgatggccagcggctccaggaggcgcaggccctctctgtggtccacgtgatgacccagaaggtcttccacctcttctgcccggacacgtcctctgctccttggaacatgactctcctggaggaactgtgctcggggctctctgagcagctggatgacctggaggcctgtcccctgcaggaggcggggctggccgagacccccctcatgcatgaggactccaccctgaggacctacttccaaaggatctccctctacctgcaagacaggaaccacagcccgtgtgcctgggagatggtccgagcagaaatcgggagatccttcttctcctcgacaatcttgcaagaaagaatcaggaggaggaaatgagacccgcccggrtccgtcgacctgcagccaagctt

SEQ ID NO: 210937 - DNA, 631 bp, Canis familiaris; identical to SEQ ID NO: 830

SEQ ID NO: 210938 - DNA, 620 bp, Canis familiaris; identical to SEQ ID NO: 831

SEQ ID NO: 210939 - DNA, 617 bp, Canis familiaris; identical to SEQ ID NO: 832

SEQ ID NO: 210940 - DNA, 709 bp, Canis familiaris; identical to SEQ ID NO: 833
  misc_feature (283)..(283): n is a, c, g, or t
  misc_feature (426)..(426): n is a, c, g, or t

SEQ ID NO: 210941 - DNA, 230 bp, Canis familiaris; identical to SEQ ID NO: 834

SEQ ID NO: 210942 - DNA, 302 bp, Canis familiaris; identical to SEQ ID NO: 835

SEQ ID NO: 210943 - DNA, 724 bp, Canis familiaris; identical to SEQ ID NO: 836
  misc_feature (444)..(444): n is a, c, g, or t

SEQ ID NO: 210944 - DNA, 570 bp, Canis familiaris; identical to SEQ ID NO: 837

SEQ ID NO: 210945 - DNA, 605 bp, Canis familiaris; identical to SEQ ID NO: 838
  misc_feature (163)..(163): n is a, c, g, or t

SEQ ID NO: 210946 - DNA, 649 bp, Canis familiaris; identical to SEQ ID NO: 839

SEQ ID NO: 210947 - DNA, 575 bp, Canis familiaris; identical to SEQ ID NO: 840

SEQ ID NO: 210948 - DNA, 632 bp, Canis familiaris; identical to SEQ ID NO: 841

SEQ ID NO: 210949 - DNA, 476 bp, Canis familiaris; identical to SEQ ID NO: 842

SEQ ID NO: 210950 - DNA, 684 bp, Canis familiaris; identical to SEQ ID NO: 843

SEQ ID NO: 210951 - DNA, 1400 bp, Canis familiaris
ggaggagcttctggtgcccctgatgtaagcgaagccacctccaccttccctgaagccgatgtggagggagcctcaggcttgggagtgagtggtggcacctcagcctttcctgaagcccccagggagggctcagccaccccagaagtccaggaggagccaaccacatcctatgatgtgggccgagaggcgttgggctggccttcagccactccaacagcatctggagacaggattgaagtcagtggagacctgtctggtcacacgtcggggctggatgttgtcatcagcactagcgtcccagagtctgagtggatccagcagacccagcgccctgcagaggcgcatttagaaatcgaggcctcaagccccttgcactcaggagaggagacccaaacagccgagacagccacctcccctacagatgatgcttccatcccaacttctccatcagggacagatgagtcagcaccagccattccagacattgacgagtgcctctcaagtccttgtttgaatggagccacctgcgtggacgccatcgactctttcacatgcttatgccttcccagctaccgaggggacctgtgtgagatcgaccaggagctgtgtgaggagggctggaccaagttccagggccactgttaccgctacttccccgaccgtgagagctgggtggatgcggagagccggtgtcgggcacaacagtcacacctgagcagcattgtcacccctgaggaacaggagtttgtcaacaacaakgcccmagactaccagtggattggcctgaatgacaggaccatcgaaggggacttccgctggtcagatggacactccttgcaatttgagaactggcgccccaaccagcccgacaacttctttgtcagcggagaggactgtgtggtgatgatctggcacgagaagggagagtggaatgacgtgccttgcaattactacctgcccttcacgtgtaaaaagggcacagtggcctgcggagacccccctgtggtggaacacgccaggaccttcggccagaagaaggaccgctacgagatcaactcgttggtacggtaccagtgcactgagggtttcgtccagcggcatgtgccgaccatccggtgccagcctagcggccactgggaaaaacctcgcatcacctgcacagacccctccacttacaagcgcagactacagaagcggagctcacgggccccacggaggagccgccccagcacagcccactgagaggagcttccaggacgcacccaggatgctgagcccaggagccccgccaggctgacatcccacatggatggtgtcctcttcttgccgctttctgtcatataaggaattccattaaaraarraaaaaaaaamaaaaaaaaraaaaaaaaaaaaaaaaaa

SEQ ID NO: 210952 - DNA, 602 bp, Canis familiaris; identical to SEQ ID NO: 845

SEQ ID NO: 210953 - DNA, 473 bp, Canis familiaris; identical to SEQ ID NO: 846

SEQ ID NO: 210954 - DNA, 529 bp, Canis familiaris; identical to SEQ ID NO: 847

SEQ ID NO: 210955 - DNA, 623 bp, Canis familiaris; identical to SEQ ID NO: 848

SEQ ID NO: 210956 - DNA, 621 bp, Canis familiaris; identical to SEQ ID NO: 849

SEQ ID NO: 210957 - DNA, 694 bp, Canis familiaris; identical to SEQ ID NO: 850

SEQ ID NO: 210958 - DNA, 1400 bp, Canis familiaris
aggcattgccatggaagcgattgcctttgcacgtaaccaaggctttgatgtggtgctggtggacacagctggccgcatgcaagacaatgcccctctgatgactgccctggctaagctcattactgtcaacacacccgacttggtgctgtttgtgggggaggccttagtaggcaatgaggccgtggaccagctggtcaagttcaacagagccttggctgaccattctatggctcaaacacctcggctcattgatggcattgtccttaccaaatttgataccattgatgacaaggtgggagctgctatttctatgacctacatcacgagcaaacccatcgtctttgtgggcactggccagacctactgtgacctacgcagcctcaatgcsmasgmkgtggtggctgccctcatgaaggcttaacatggctcttgcccaaaaccaaatcactgcttcccccaaagcccctcttcctgtatcaagaatgtgctttagaatacgtgagtgacttctcttcagtgtagtacagaggcagagtgaggggagttctaggggcctgcagttccccctgccccactccttggcagcccagcctccacctgcaagggcctaatcatgttacagtccactgcccatcacccccgtccctgacagtcatccttcctactcaggcattcccttctctctgcctacacactcagtctcattacagctttgaccaacggttggaagatccaacaccagagctttgctaattcgcaccggtcacagggatgtctgagcacaatgagcagtcgaracttccagagccagctctgggttatcccttggatccacagctttcaggcccctggggccaggatgatacccaccacactatgkcagtgtatggcctgttccaattgctgctaattcttatgatgaccccatccccactgtttcctcaaagcattagctaggccagaatgatttgttagaaatgmacaaaaggagttcctgcttccctcraaaataaagggagctgagctgcagtgttgcattgggcttctcagccttccaactcttccctgctcccagaatccagatgtaagctttgcatgttccctttcctgggagagaaccaactgtcaaaagggtatacaagttgcccctctcccccaccccactcttcacctgagtggatcctggcttttcctcctcctcctctctacagtgcctggtagacaagtgctacgttgaagaatacaaacctcttgttaagacttgtcctgtagcttggtattacagatgtgctattagtgcaataaggtgaaggctgtctgcccagagaaatacataawwtatataagaaaataaatttcataagtaaattgcmwwwwaaaaaaaaaaaaaaaaaaaaaaa

SEQ ID NO: 210959 - DNA, 587 bp, Canis familiaris; identical to SEQ ID NO: 852

SEQ ID NO: 210960 - DNA, 700 bp, Canis familiaris; identical to SEQ ID NO: 853

SEQ ID NO: 210961 - DNA, 596 bp, Canis familiaris; identical to SEQ ID NO: 854

SEQ ID NO: 210962 - DNA, 690 bp, Canis familiaris; identical to SEQ ID NO: 855

SEQ ID NO: 210963 - DNA, 1400 bp, Canis familiaris
atactcacgagccagtacgtgcgtttgaccccggatgagcgcagcaaagagggctctatctggaaccaccagccttgtttcctcaaggactgggagatgcacgtccactttaaagtccatggtacggggaagaaaaatctccatggagacggcattgccttgtggtacacccgggaccgccttgtgccagggcctgtgtttggaagcaaagacaacttccatggcttagccatcttcttggacacgtatcccaatgatgagaccacggagcgtgtgttcccgtacatctcggtgatggtgaacaatggctccctgtcctacgaccatagcaaagatggccgctggacggagctggcaggctgcacggctgacttccgtaaccgtgatcatgataccttcctagctgtgcgctactctcggggccggctgacggtaatgactgacctagaggacaagaatgagtggaagaattgcattgacatcacgggagtgcgcctgcccactggttactactttggagcctcagctggcactggtgacctgtctgacaatcatgacatcatttccatgaagctgttccagctgatggtagaacacacgcctgacgaagagaacattgactggaccaagattgagcccagtgtcaatttcctcaagtcacccaaagacaatgtggatgacccgactggaaacttccgaagtgggcccctgaccgggtggcgggtgttcctkctgctgctgtgtgcactcttgggcatcatcgtgtgcsctktgktggggsccgtagtgtttcagaarcggcaggagcggamcaagcgtttctactgagtggccggtgctctgttccagggaagggcctagttttgggccccggcactaatgtgaacttttttttactgggattataaaagawawataagatgaccktatttcttaaccgtttcaaagaaacmaaagtattttcgtacattttgctttatgcccagcagggacaggctgcagggctagggaatagggtttggcatccccacagctgcggacmaaggtccttgcctgttcccagcatcttgggagcagggaggaaactgtgtttggagctgggccctggcagtcagctcttgaacactggcagtcagctcttgaacactaccacattggggtaagtgcctgacgatgtgagcagtgattttgttctgtgcagcgtgtgttggtagaagaggaggctgactggggaaccttggccttattaccctctgagcttcccaaggccgaccctcaagtgtggctggaggagcmatttggtagggctcagaatgtgaccataggctaaataaaatgaaataaccmmccwmaaaaaaaaaaaaaaaaaaaaaaaaaaaaaaaaaaaaaaaaaaaaaaaa

SEQ ID NO: 210964 - DNA, 1400 bp, Canis familiaris
taatatcatacccccaagacaccagaaacctgcaggggctccagcaacaaaaaagaaacagcaacagaaaaagaagaaaggtggaaaaggtggctggtgattaaagcattcttgttttcaggctatttttagtctcgctgacactaggaacacaataaaggtaacacagtaagaagcacagagctactcccctctcccatccccccgttttcatgaaattgttttcttgcacatcccccaggaaaacatcttcctcaaactctgtctagtcagacttggcctactttaccatccagctttgcacaaatgataaggactcaaaattgggcatttttccaccttgatctctgttgcattctttctctttgtgtgctgtgatctggtgtttttttttcagtttcacaaacaatgcatgttatccagagtttcctaggatctaaacagaaactacttcggtttcaactagagtctgaagatacttgttcatatcaaatcccactttaaattatgtcttaggaggccttaggagactgaaagtggaatcttctgagcattccaaatagctgcttagagatatcatgtgataaaaagggaccttattacacgctggtgttcttcacttcattacatgaatgaccacaggaaaactaaagtaaatgtcatcagttttaaccatacatcctgtcatgtgatcctggagtatgggataccgaatacacatactatataaatagtaatgaaatgtgtgtgtgtcatatatacacacatatacacatatatatgaattaggactcctctgcaccccgttttgttttcagattatgataacattatgctgatttagcattaaagaactcaaggaaaatgtagcagtgttgcaagaagttgactctgagacccagtgttctgaggtcagatgggtttggagtgtctcaatcagaaagatttcatggccctgtcaagagcatgaacattgacttctgagggcagaggggaaccctccagagttcaatagtgggcattattagaacttaacagaactgtttggccccattaacagatactaaaatgactcgccttcatcatttggggtacaactattcattacccttctcaaagtaatgaagtattgtacattcagtctggtgtcagtgttgctctggtcttcttgcttgcaagccactttcccattgaacagctctgagacagacatgctgggatgcccacccttgttagtattcattttgtactgcccaagatagcattgaatttagactttaagtatttccttgtgatcatattacttcatccttgttaataaagtgctgctgtgttggactctgaaaaaaaaaaaaaaaaaaaaaaaaaaaaaaaaaaaaaaaaaaaaaaaaaaaaaaaaa

SEQ ID NO: 210965 - DNA, 1017 bp, Canis familiaris; identical to SEQ ID NO: 858

SEQ ID NO: 210966 - DNA, 600 bp, Canis familiaris
gccttcacccagccaccggccagcatgtctgggggcaaatacgtagactccgaggggcacctctacaccgttcccatccgggagcagggcaacatctacaagcccaacaacaaggccatggcggaggagatgagcgagaagcaggtgtacgacgcgcacaccaaggaaatcgacctggtcaaccgcgaccccaagcatctcaacgacgacgtggtcaagattgattttgaagatgtgattgcagaaccagaaggaacacacagttttgatggcatctggaaggccagcttcaccaccttcactgtgacaaaatactggttttaccgcttgctgtctgccctctttggcatcccaatggcactcatatggggcatttactttgccattctttctttcctgcacatctgggcagttgtgccgtgcattaagagtttcctgattgagattcagtgcatcagccgtgtctattccatctacgtccacaccttctgtgacccgttctttgaggctgttggcaaaatattcagcaatatccgcatcaacatgcagaaagaaacataaatgacattttaaggatagcagttaacctgattctttttt

SEQ ID NO: 210967 - DNA, 661 bp, Canis familiaris; identical to SEQ ID NO: 860

SEQ ID NO: 210968 - DNA, 1400 bp, Canis familiaris
actcctcagcagacatcaattccagtcttcctccgatgtccactttccaccgtagtggcacaaaccattacagcacctcttcctgtacacctcctgccaacgggacagacagtataatggcaaatagaggaagcggggcagcaggcagctcccagactggagatgctctggggaaagcacttgcttcgatctattctccagatcacactaacaacagcttttcatcaaacccttcaactcctgttggctctcctccttctctctcagcaggcacagctgtttggtctagaaacggaggacaggcctcatcatctcctaattatgaaggacccttacactctttgcaaagccgaattgaagatcgcttagaaagactggatgatgctattcacgttctccggaatcatgcagtgggcccatccacagctatgccgggtggtcatggggacatgcatggaatcattggaccttctcataatggagcgatgggtggtctgggctcagggtatggaaccggtcttctttcagccaacagacattcactcatggtcggggcccatcgcgaagacggcgtggccctgcgaggcagccactccctcgtgcccaaccaggtcccggtgccacagcttcccgtgcagtctgcgacgtcccctgacctgaacccaccccaggacccttacagaggcatgccaccgggattgcagggccagagcgtctcctccggcagctctgagatcaaatccgacgacgaaggcgatgagaacctgcaagacacgaaatcttccgaggacaagaagttagatgacgacaagaaggatatcaaatcgattactagcaataacgatgacgaggacctgaccccggagcagaaggcggagcgcgagaaggagcggaggatggccaacaacgcccgcgagcgcctgcgcgtccgcgacatcaacgaggctttcaaggagctcggccgcatggtgcagctccacctcaagagtgacaagccccagaccaagctcctgatcctccaccaggccgtggccgtcatcctcagcctggagcagcaagttcgagaaaggaatctgaatccgaaagccgcgtgtctgaaaagaagggaggaagagaaggtgtcctcagagcctcccccgctctccttggcgggcccgcatccctggaatgggagatgcgtcwaaccacagtgggacagatsymaaagggtccaagctgccacattgcttcattaatacaagagaccacttccttaacagctgtattatcttaaacccacataaacacttctccttcacccctttttttgtaatataagacaagtctgagtagttatgaatcgcagacgcaagaggtttcagcattcccaattatcaaaaaaccgaaaaacacacaaaaaa

SEQ ID NO: 210969 - DNA, 535 bp, Canis familiaris; identical to SEQ ID NO: 862

SEQ ID NO: 210970 - DNA, 1167 bp, Canis familiaris; identical to SEQ ID NO: 863

SEQ ID NO: 210971 - DNA, 1400 bp, Canis familiaris
agctcaagccagatcagaaacagagagattacacccttgacggggagtcgggaaaggtatctaatcttcaatacctgcacagctacctgacttatatcaagctgtcaacggccatcaggcggaacgagaacatggctaaggggctgcagaaagcactacagcagcagccagaagatgagagcaagcgctcgccacggccccaggacctcatccggctctatgacatcattctacagaatctggtggaattgctccagcttcctgggttagaggaggacagagccttccagaaagagataggcctcaagactctggtgtttaaggcttacaggtgttttttcattgctcagtcctatgtgttggtgaagaagtggagcgaagccctcgtcctgtatgaccgagtcctgaaatatgcaaatgaagtaaattcggatgctggggccttcaggaacagcttaaaggacctgcccgatgtgcaagagctcatcactcaagtgaggtcagaaaagtgttctctgcaggcagcagcaatcctggatgcaagtgactcccaccaaccggagacttcttcccaagtcaaggacaacaagcctctggttgaacggtttgagacattctgcttggacccttccctcgtcaccaagcaagccaaccttgtgcacttcccgccaggattccagcctatcccctgcaagcctttgttctttgacctggccctcaaccatgtggctttcccacccctcgaggacaagttggagcagaagaccaagagtggcctcactggatacatcaagggcatctttggattccggagctaaccaggctcttcttgggggcaaggggagattctcactcttcatctgtattgtgagaaaaccctagcaagttccatgatattaaatccaggtctgcattggccccgggcaagagtgtatcatcctcagccctgcgtccctatgtcttgtgtgtttgtgcacttaacattcttaaccggtgtgctcaaaggggaccctgctgtcttctggtggatgtgtgcgggattcctctgtccgcacctcctgggggaagggccactgccacctggccccatgggagccgtgcttgggtgggtccactccaggcatagatgggagctcggaactttgtcgtgtttyttcagtattcacggaatttggaawtggactccttcctcgctgtgagcatccatccagagtcccgtgaagagtctgtgaccaggaaccactggcagcatcaccccacaactacagtcagccttatgccctgtcacctccaagtggaagttaagtttcagaacaagcaaagagctctatttttagaagaaatgtgttacactcagaaatgatgaaaacaaatcttatattaaaaggcaaagatgctgg

SEQ ID NO: 210972 - DNA, 600 bp, Canis familiaris
tgtatgtacccacagtgtttgagaactatgtggcagatattgaagttgatggaaagcaggtagagttggctttgtgggatacagctgggcaggaagattatgatcgcttgaggcctctctcctatccagacactgatgttatactgatgtgtttctctattgacagccctgatagcttagaaaacatcccagaaaaatggaccccagaagtcaagcacttctgtcccaacgtgcccatcatcctggttgggaacaagaaggatcttcggaatgatgagcacacaaggcgggagctagccaagatgaagcaggagccggtgaaaccgacagaaggcagagatatggcaaacaggattggtgcttttgggtacatggagtgttcagcaaagaccaaagatggagtgagggaggtttttgaaatggccacgagagctgctctgcaagccagacgtgggaagaaaaaatctgggtgccttgtcttgtgaaaccctgctgcaagcacagccctcatgcggttaattttgaagtgctgtttattaatcttagtgtatgattactggcctttttcatttatctataatttacctaagattacaaatc

SEQ ID NO: 210973 - DNA, 1075 bp, Canis familiaris; identical to SEQ ID NO: 866

SEQ ID NO: 210974 - DNA, 707 bp, Canis familiaris; identical to SEQ ID NO: 867

SEQ ID NO: 210975 - DNA, 619 bp, Canis familiaris; identical to SEQ ID NO: 868

SEQ ID NO: 210976 - DNA, 658 bp, Canis familiaris; identical to SEQ ID NO: 869

SEQ ID NO: 210977 - DNA, 1055 bp, Canis familiaris; identical to SEQ ID NO: 870

SEQ ID NO: 210978 - DNA, 636 bp, Canis familiaris; identical to SEQ ID NO: 871

SEQ ID NO: 210979 - DNA, 592 bp, Canis familiaris; identical to SEQ ID NO: 872

SEQ ID NO: 210980 - DNA, 641 bp, Canis familiaris; identical to SEQ ID NO: 873

SEQ ID NO: 210981 - DNA, 1400 bp, Canis familiaris
ttaatgggtttaatggagagggcggcgaagaggacccgcaagctgcaaggagcaacagcgatggtgagaaggcaaccaaagttcaggacatcaaaaacaacctgaaagaggcgatcgaaaccatcgtggccgccatgagcaacctggtgccccccgtggagctggccaaccctgagaaccagttcagagtggactacattctgagcgtgatgaacgtgcctgactttgacttccctcctgagttctatgagcatgccaaggctctgtgggaggatgaaggagtgcgtgcctgctatgagcgctccaacgagtaccagctgattgactgcgcccagtacttcctggacaagattgatgtcatcaagcaggctgactacgtgcccagtgatcaggatctgcttcgctgccgtgtcctgacttctggaatctttgagaccaagttccaggtggacaaagtcaacttccacatgtttgacgtgggtggccagcgcgatgaacgccgcaaatggatccaatgcttcaatgatgtgactgccatcatcttcgtggtggccagcagcagctacaacatggtcattcgggaggacaaccagaccaaccgcctgcaggaggctctgaacctcttcaagagcatctggaacaacagatggctgcgcaccatgctctgtgattctgttcctcaacaagcaagacctgctcgctgagaaagtccttgctggaaaatcgaagattgaggactactttccagaatttgctcgctacactactcctgaggatgctactcccgagcccggagaggacccacgcgtgacccgggccaagtacttcatccgcgacgaatttctgagaatcagcactgctaktggagatgggcgccactactgctacccccacttcacttgcgctgtggacaccgagaacattcgccgtgtgttcaacgactgccgtgacatcattcagcgcatgcaccttcgtcagtatgagctgctctaagaagggracacccarakttaattraagccttaagcacmattaattaagagtgwaacgtaattgtacacgcagttgatcacccaccatagggcatgattaacaacgcaacctttccttttctccccaagtgattttgcgaaacccccttttcktcccttccgcttgcttaaatattccmaatttagaaggcttaaggcggcctacagagaaaaaraaaaggaaaaaggccacaaaagttcyctstctctttcagtaattaaaataacagcagcaaacagagataatgaaataaaagaaataaatgaaataaaagaaataaatgaaataaatgaaataaatattgtcttgtgcagcattaaaaaaatmmaaataaaaattaaatgtgagcmaaaaaaaaaaaaaaaaaa

SEQ ID NO: 210982 - DNA, 551 bp, Canis familiaris; identical to SEQ ID NO: 875

SEQ ID NO: 210983 - DNA, 819 bp, Canis familiaris; identical to SEQ ID NO: 876

SEQ ID NO: 210984 - DNA, 692 bp, Canis familiaris; identical to SEQ ID NO: 877
  misc_feature (49)..(49): n is a, c, g, or t

SEQ ID NO: 210985 - DNA, 646 bp, Canis familiaris; identical to SEQ ID NO: 878

SEQ ID NO: 210986 - DNA, 300 bp, Canis familiaris; identical to SEQ ID NO: 879

SEQ ID NO: 210987 - DNA, 620 bp, Canis familiaris; identical to SEQ ID NO: 880

SEQ ID NO: 210988 - DNA, 563 bp, Canis familiaris; identical to SEQ ID NO: 881

SEQ ID NO: 210989 - DNA, 544 bp, Canis familiaris; identical to SEQ ID NO: 882

SEQ ID NO: 210990 - DNA, 632 bp, Canis familiaris; identical to SEQ ID NO: 883
  misc_feature (148)..(148): n is a, c, g, or t

SEQ ID NO: 210991 - DNA, 755 bp, Canis familiaris; identical to SEQ ID NO: 884

SEQ ID NO: 210992 - DNA, 608 bp, Canis familiaris; identical to SEQ ID NO: 885

SEQ ID NO: 210993 - DNA, 647 bp, Canis familiaris; identical to SEQ ID NO: 886

SEQ ID NO: 210994 - DNA, 665 bp, Canis familiaris; identical to SEQ ID NO: 887

SEQ ID NO: 210995 - DNA, 691 bp, Canis familiaris; identical to SEQ ID NO: 888

SEQ ID NO: 210996 - DNA, 650 bp, Canis familiaris; identical to SEQ ID NO: 889

SEQ ID NO: 210997 - DNA, 636 bp, Canis familiaris; identical to SEQ ID NO: 890

SEQ ID NO: 210998 - DNA, 706 bp, Canis familiaris; identical to SEQ ID NO: 891

SEQ ID NO: 210999 - DNA, 500 bp, Canis familiaris; identical to SEQ ID NO: 892

SEQ ID NO: 211000 - DNA, 587 bp, Canis familiaris; identical to SEQ ID NO: 893

SEQ ID NO: 211001 - DNA, 600 bp, Canis familiaris
caccctggccctctctcacctaggcagcccccaaggcggaggccacaggaccagctgggccaggtctcagaggacctggcttggccactatatgcaagtaggacaaaggttccgagaatgggtcactggctcaggaccccagggagcaaggccctcccagtccatgctgtgcagacctcaggcctcacaagctctgcagttgcccctcctcactaggcatcctcttggttctgctcagtgaatccttggccctgctagcacccccacctacccttcccaccacttgagattgcacccccaccctaaagccaggggccgggaagcaaacagctcttctgtgaagcaaagctcagcatggaggcggctagtcttggaaggcagccaagctcggtcacctgcctggtggacatggagtgtggggcaggggccaggggcccacagacaggccaggctgctctgggaggtggaggctattcctggccaggctgtccagcttcctgaggcccctggggcatgcaggaggccagggttttagttaaaagttttaatgtagttcccaaatacatttcatatgacaatcttacataaatgttccaaaac

SEQ ID NO: 211002 - DNA, 671 bp, Canis familiaris; identical to SEQ ID NO: 895

SEQ ID NO: 211003 - DNA, 626 bp, Canis familiaris; identical to SEQ ID NO: 896

SEQ ID NO: 211004 - DNA, 600 bp, Canis familiaris
cacctatgccttgaccattgtgtggctcctggtgtttgcctgctctgctgtgcctgtgtacatttacttcaatacctggaccacctgccagtcaattgccttccccagcaagacttctgccagtataggcagtctctgtgctgatgccagaatgtatggtgttctcccatggaatgctttcccaggcaaagtgtgtggctccaaccttctgtccatctgcaaaacagctgagttccaaatgacgttccacctgtttattgctgcattcgtgggggctgcagccacactggtttccctgctcaccttcatgattgctgccacttacaactttgccgtccttaaactcatgggccgaggcaccaagttctgatctcctgtagaaatgtccctttctctaatagcgaggctctaaccacacagcctacaatgctgcgtctcccatgttaactctttgcctttgccatctattggccctttcttacttgacgagtgtaacaagaaaggagagtcttgtggtgattaatgtctctctgtggactctcccccttacatacctcttttagtcattttgcttcacagctggttcctgctagaaatggg

SEQ ID NO: 211005 - DNA, 600 bp, Canis familiaris
ctcttcagattacctgtcaaaacagtcccttaatttcctcccaagcagagatggcatttgcttctcaatgttcatgaagcacaccaaggaattagaagcatttgttgtttcaagtctgtggagtagggttactgggcccaatgcccccccccccacagagatggtcccccaacccacctaggatatcccaatagcaatacccatttctgattatcattgagattggacatcttagtagaaatattatacacactcgaaatcatgacttatccaccagttcacttgtaactaataactaaacagttgtgttatcgtttggcatgtgtttctcacctgtgacattttgaaatagtacatcctgataatgtattttatcttaagtagttgaaataacactttggaaaccgtcctagaaaagtaacttcaacacaattgttactaaaatttgcattcacaacatgaaataaattttcttcctatgaaatgattgtgctgagtcctacagtatggcattttgtaatttgtgagcttcttttaatgttaccgttatatgtgttacaactgaagacagggaaaaaaaacaactggcaaatttgctaa

SEQ ID NO: 211006 - DNA, 600 bp, Canis familiaris
tcttcagattacctgtcaaaacagtcccttaatttcctcccaagcagagatggcatttgcttctcaatgttcatgaagcacaccaaggaattagaagcatttgttgtttcaagtctgtggagtagggttactgggcccaatgcccccccccccacagagatggtcccccaacccacctaggatatcccaatagcaatacccatttctgattatcattgagattggacatcttagtagaaatattatacacactcgaaatcatgacttatccaccagttcacttgtaactaataactaaacagttgtgttatcgtttggcatgtgtttctcacctgtgacattttgaaatagtacatcctgataatgtattttatcttaagtagttgaaataacactttggaaaccgtcctagaaaagtaacttcaacacaattgttactaaaatttgcattcacaacatgaaataaattttcttcctatgaaatgattgtgctgagtcctacagtatggcattttgtaatttgtgagcttcttttaatgttaccgttatatgtgttacaactgaagacagggaaaaaaaaacaactggcaaatttgctaa

SEQ ID NO: 211007 - DNA, 637 bp, Canis familiaris; identical to SEQ ID NO: 900

SEQ ID NO: 211008 - DNA, 695 bp, Canis familiaris; identical to SEQ ID NO: 901

SEQ ID NO: 211009 - DNA, 741 bp, Canis familiaris; identical to SEQ ID NO: 902

SEQ ID NO: 211010 - DNA, 680 bp, Canis familiaris; identical to SEQ ID NO: 903

SEQ ID NO: 211011 - DNA, 709 bp, Canis familiaris; identical to SEQ ID NO: 904

SEQ ID NO: 211012 - DNA, 630 bp, Canis familiaris; identical to SEQ ID NO: 905

SEQ ID NO: 211013 - DNA, 609 bp, Canis familiaris; identical to SEQ ID NO: 906

SEQ ID NO: 211014 - DNA, 600 bp, Canis familiaris
  misc_feature (578)..(578): n is a, c, g, or t
tccctgcacgtaaccccaacttgtttgttgtcttcgttcactggtggccttctgtgacgtcacactgtaacgttgggaagatggctccctggggcatccctgctcttcagaacttggccctgggagccttggssctrtctgtctcrtggagcctgaaactggggcctaactgcagtcacctcccttctttgggcagtagaaacactttcaaaacccaaatctggtcataatctcttagcatcccggctttttgtctgaggggtcatctgactgcatctcctccacggctgtcccaccctagaatgtgacttccctcctcaggaacctgcaggagactccaggaattttctgggggttggctctccatttgtcagcctctcctccctaaggtgtccaggtggcagagttgtacagagcagctttctccccagtggctgcagcaggcgggcatgctgtcaggcccatggaggaacctcagctcggttcctcaggcacctttcagggtgtagcttgggcctaaggagcccatgagaaaggatcctaaccccggaaaaggctgtgtgggacttggccctggncccccaatgggcctttggaaag

SEQ ID NO: 211015 - DNA, 600 bp, Canis familiaris
agtcacttaagatgtttgactttgctttcgccagaaacagaaggatccaagtccttggtgatttttccaagatttatcttaaacccaaagcaaggtcattcatttcataaactgactttactgttcaagcacacatgcttgaaaaattaaaaacatcttttcaaaatggcaaaaatagtaatacgctcttaaaggtttgagtttctggtatggttgactgaacatgactagtattttattctggcaaatatttaaatatataaagagtgaaatttccttctgaattctatcatactttatggtcttgaaaaggtactgaatctcgagctttgaaaatagggaatatataaatattgagaattacttaaggcaattacttaaggcttgccatatatttcaaaatagcttgagctggactgcatgaaagtgttgcaaccatttcatgctttgctttccccctctttccatctctggatgggccaggctggcgctcacaggatcagactctatgagagggaagattatagaggccagatgatggagttcaccgaggactgctcctctcttcaggaccgcttccacttcaatgagatttactcc

SEQ ID NO: 211016 - DNA, 624 bp, Canis familiaris; identical to SEQ ID NO: 909

SEQ ID NO: 211017 - DNA, 721 bp, Canis familiaris; identical to SEQ ID NO: 910

SEQ ID NO: 211018 - DNA, 590 bp, Canis familiaris; identical to SEQ ID NO: 911

SEQ ID NO: 211019 - DNA, 672 bp, Canis familiaris; identical to SEQ ID NO: 912

SEQ ID NO: 211020 - DNA, 270 bp, Canis familiaris; identical to SEQ ID NO: 913

SEQ ID NO: 211021 - DNA, 625 bp, Canis familiaris; identical to SEQ ID NO: 914

SEQ ID NO: 211022 - DNA, 634 bp, Canis familiaris; identical to SEQ ID NO: 915

SEQ ID NO: 211023 - DNA, 595 bp, Canis familiaris; identical to SEQ ID NO: 916

SEQ ID NO: 211024 - DNA, 657 bp, Canis familiaris; identical to SEQ ID NO: 917

SEQ ID NO: 211025 - DNA, 686 bp, Canis familiaris; identical to SEQ ID NO: 918

SEQ ID NO: 211026 - DNA, 649 bp, Canis familiaris; identical to SEQ ID NO: 919

SEQ ID NO: 211027 - DNA, 600 bp, Canis familiaris
gctttcctccagaggaggactggcaatggtgatacagtttagttggcgacatgcccagggacaacccactgagccccatactcctccccgtcactgacactgacctctgttagccgtctctctccccatacgcatctctgctagtgctcacgatgacatcgctgcatgcctgaacacgaatgaccactcactggcagctaaactgtggagtcccatgaaactgcccaacccctatgtgtccctgcctggtcctgtttccatctcggtggcaccatacaaggacacagcactctggcagcccaaattcctgcagagacgagggccctgcaggcagttggcagaagaggccggcgaggattcctgtcccagctccggaagcttctctcttgtagtaataaagcttgtctgtgggcgcttgtcttgtgtgagtggaggggaggtgtcatgtccagttgggagttctttccagccacaacctcccacttcctcccccaagaaaaggctgccggttcaaggcccacccctgaggctctaatccaaatttggggcttgttaggaccttttgagactccagcgaaaattaaagatccctctctccag

SEQ ID NO: 211028 - DNA, 643 bp, Canis familiaris; identical to SEQ ID NO: 921

SEQ ID NO: 211029 - DNA, 569 bp, Canis familiaris; identical to SEQ ID NO: 922

SEQ ID NO: 211030 - DNA, 589 bp, Canis familiaris; identical to SEQ ID NO: 923

SEQ ID NO: 211031 - DNA, 687 bp, Canis familiaris; identical to SEQ ID NO: 924

SEQ ID NO: 211032 - DNA, 635 bp, Canis familiaris; identical to SEQ ID NO: 925
  misc_feature (36)..(36): n is a, c, g, or t

SEQ ID NO: 211033 - DNA, 619 bp, Canis familiaris; identical to SEQ ID NO: 926

SEQ ID NO: 211034 - DNA, 661 bp, Canis familiaris; identical to SEQ ID NO: 927

SEQ ID NO: 211035 - DNA, 608 bp, Canis familiaris; identical to SEQ ID NO: 928

SEQ ID NO: 211036 - DNA, 704 bp, Canis familiaris; identical to SEQ ID NO: 929

SEQ ID NO: 211037 - DNA, 516 bp, Canis familiaris; identical to SEQ ID NO: 930

SEQ ID NO: 211038 - DNA, 600 bp, Canis familiaris; identical to SEQ ID NO: 931

SEQ ID NO: 211039 - DNA, 620 bp, Canis familiaris; identical to SEQ ID NO: 932

SEQ ID NO: 211040 - DNA, 574 bp, Canis familiaris; identical to SEQ ID NO: 933

SEQ ID NO: 211041 - DNA, 593 bp, Canis familiaris; identical to SEQ ID NO: 934

SEQ ID NO: 211042 - DNA, 668 bp, Canis familiaris; identical to SEQ ID NO: 935

SEQ ID NO: 211043 - DNA, 550 bp, Canis familiaris; identical to SEQ ID NO: 936

SEQ ID NO: 211044 - DNA, 652 bp, Canis familiaris; identical to SEQ ID NO: 937

SEQ ID NO: 211045 - DNA, 649 bp, Canis familiaris; identical to SEQ ID NO: 938

SEQ ID NO: 211046 - DNA, 565 bp, Canis familiaris; identical to SEQ ID NO: 939

SEQ ID NO: 211047 - DNA, 571 bp, Canis familiaris; identical to SEQ ID NO: 940

SEQ ID NO: 211048 - DNA, 640 bp, Canis familiaris; identical to SEQ ID NO: 941

SEQ ID NO: 211049 - DNA, 690 bp, Canis familiaris; identical to SEQ ID NO: 942

SEQ ID NO: 211050 - DNA, 575 bp, Canis familiaris; identical to SEQ ID NO: 943

SEQ ID NO: 211051 - DNA, 664 bp, Canis familiaris; identical to SEQ ID NO: 944

SEQ ID NO: 211052 - DNA, 641 bp, Canis familiaris; identical to SEQ ID NO: 945

SEQ ID NO: 211053 - DNA, 663 bp, Canis familiaris; identical to SEQ ID NO: 946

SEQ ID NO: 211054 - DNA, 631 bp, Canis familiaris; identical to SEQ ID NO: 947

SEQ ID NO: 211055 - DNA, 738 bp, Canis familiaris; identical to SEQ ID NO: 948
  misc_feature (99)..(99): n is a, c, g, or t

SEQ ID NO: 211056 - DNA, 617 bp, Canis familiaris; identical to SEQ ID NO: 949

SEQ ID NO: 211057 - DNA, 1400 bp, Canis familiaris
tggagcattgtcacaacggcaccaacttcttcaccggggagctgggggtgcgcctggactacatctccctccacaagaagggcgcggggagctccatctacatcctggaacaggagcaggccaccgtgcagcagatccgacggctcttccccaagttcgccgacacccccgtttacaacgacgaggcggacccsctggtggsctgkgccctgccgcagcmctggagagccgacgtgacgtacgcggccatggtggtgaaggtcgtggcgcagcaccagaacccgccccgggccaacggcagcgcggmcmtgcgccccgcgctcctgagcaacgacaacgccttcctgagcttccacccgcacccgttcacgcagcgcacgctcaccgcgcgcttccaggtcaacgacacggarccgccgcacgtgcagctgctgcgcaagccggtgctcacggccatggcgctgctggccctgctggacggccggcagctgtgggccgaggtgtcgcggggcgggacggtgctggacagcaaccacacggtgggcgtcctggccagcgcgcacctgccggccgggccccgggacgcctggcgcgccaccgtgctgctctacgcgagcgacgacacgcgcgcccacgccgcccgcgccgtgcccgtgacgctgcgcctgctcggggtgccgcggggcccagggctcgtctacgtcaccctggccctggacaacccgcgctgcagcccccacsgcgagtggcagcgcctgrgccggcccgtcttccccacggcggaggagttccggcgcatgcgcgcagccgaggacccggtggccgaggcgccgcgccccttccccgccagcggccgcctgacgctcagcgtggagctgcggctgccctcgctgctgctgctgcacgtgtgcgcgcgcccggagaagccgccgggaccggtgacccggctccgtgccctgcccttgacccgtgggcaggtgcttttggtgtggtcggatgagcgcgtgggctccaagtgcctgtggacctatgagatccagttctccgcggatggagaagtgtacacgcccatcagcaggaagccatccacctttaacctgtttgtgttcagcccagagtcagccgtcacctctggctcctaccgggttcgagcggtggactactgggcccgaccgggccccttctcgacccgcgtgcactacgtggaggtccctgcaccgtcagggccgccgcggcccagtgactgtgagcggtgctgacctcggagccgcggaggccaggcgctgagatgggcctccaaggaaggccctcgtccgccggggatggacgcagcccgtccgtgggctccgctccttctgtgctgtctcactcccttaaagtgcctttgcgctcaccaaaaa

SEQ ID NO: 211058 - DNA, 655 bp, Canis familiaris; identical to SEQ ID NO: 951
  misc_feature (96)..(96): n is a, c, g, or t

SEQ ID NO: 211059 - DNA, 655 bp, Canis familiaris; identical to SEQ ID NO: 952
  misc_feature (96)..(96): n is a, c, g, or t

SEQ ID NO: 211060 - DNA, 663 bp, Canis familiaris; identical to SEQ ID NO: 953
  misc_feature (49)..(49): n is a, c, g, or t

SEQ ID NO: 211061 - DNA, 765 bp, Canis familiaris; identical to SEQ ID NO: 954

SEQ ID NO: 211062 - DNA, 619 bp, Canis familiaris; identical to SEQ ID NO: 955

SEQ ID NO: 211063 - DNA, 688 bp, Canis familiaris; identical to SEQ ID NO: 956

SEQ ID NO: 211064 - DNA, 688 bp, Canis familiaris; identical to SEQ ID NO: 957

SEQ ID NO: 211065 - DNA, 588 bp, Canis familiaris; identical to SEQ ID NO: 958

SEQ ID NO: 211066 - DNA, 667 bp, Canis familiaris; identical to SEQ ID NO: 959

SEQ ID NO: 211067 - DNA, 615 bp, Canis familiaris; identical to SEQ ID NO: 960

SEQ ID NO: 211068 - DNA, 1079 bp, Canis familiaris; identical to SEQ ID NO: 961

SEQ ID NO: 211069 - DNA, 625 bp, Canis familiaris; identical to SEQ ID NO: 962
  misc_feature (6)..(6): n is a, c, g, or t

SEQ ID NO: 211070 - DNA, 576 bp, Canis familiaris; identical to SEQ ID NO: 963

SEQ ID NO: 211071 - DNA, 729 bp, Canis familiaris; identical to SEQ ID NO: 964

SEQ ID NO: 211072 - DNA, 1400 bp, Canis familiaris
ggactcggtcatgagtccctgtcacaatcagggctaagaatatctggcttcaaactgtttctctggaagacactattgttttcccttttataaggtagtttttttaggagcaagcctcttccaagagaaagggatgagttttccagaagaccctactgggccatctgttgatttttctgcatgtgcctgttggctgttgtcgttgattattctggtcgggctttgaggctgaaaagcatggagttagcttggctcccccatgtctgtctgtaatcggtttgcgtcctctgagcgagtgagcgtggccaggctttgccagcctaatagaggtgcgctcggccaagcccagtggacattgtatggaggagccttgaaatgatgtgtgtctgtccagtccttctggttgtcgctggacgggcctcccactagcccctggagggaaagacggcagcctagctttcacaggtcaccgctacctcccaggctgagaacttcccatcgtgtttttagcacttttttttatcgtgcctacaacccaaatgcaggtaaagtaaatgaccagatgccacccgtctcctctcaacttccaccagaaccgccccgcagagaggagggtgcaggccccagatccgtggtgaaatctgggtcagaaagcttaggtttttgttttgtttttagtaagttgctccagtgtttgatatgaaaagactcatgattgtatctaaagtgaattgtgtgtttgtagtatcgagacctaggttgtaggcatcagaacctttcctgaggcctgtcgggaggctccttgggggacaggcagtgctgggcagcagggacagcagtcgggcgttgtgagcctgaggagttctccttggaggatgccccagttctaagcagggagcacctgggaccccaccagcagcaggcacacagtgscctttaaagcacagagccacagtcaccactccatagcggcagcaaagctggcaccacctaagtccgacttcctaggacacctcactagcagcgctaaccaggaaacagacccacccaccaagggcaagaagcgacccgcctacagcccccccagcaagtcagcagcagaagcaggctgggcccgacaggtctgtcgacccccctccagtccagggcactccaccagctagctcacacgtggccttgtcagacccagtcctgagcgagactcactgcctccctgcagcacsggcggtgggsstccgcatggtccgtggtccgtgaccgcggtgggggggcctgaccccagcttccaggggactgtcactgtggatgccaaaacgggcataactgagtgaaggtgaataagtgacaaataaaggaaactgtttacgaaaaaaaaaaaaaaaaaaaaaaaaaaaaaaaaa

SEQ ID NO: 211073 - DNA, 653 bp, Canis familiaris; identical to SEQ ID NO: 966

SEQ ID NO: 211074 - DNA, 686 bp, Canis familiaris; identical to SEQ ID NO: 967

SEQ ID NO: 211075 - DNA, 625 bp, Canis familiaris; identical to SEQ ID NO: 968

SEQ ID NO: 211076 - DNA, 638 bp, Canis familiaris; identical to SEQ ID NO: 969

SEQ ID NO: 211077 - DNA, 608 bp, Canis familiaris; identical to SEQ ID NO: 970

SEQ ID NO: 211078 - DNA, 821 bp, Canis familiaris; identical to SEQ ID NO: 971

SEQ ID NO: 211079 - DNA, 1400 bp, Canis familiaris
agttcctctacgacaacctcatcatcttctccccctcggtggaagatttcggaggcaacatcaatgtggagaccatcagtaccttcatcgatggtggaggcagtgtcctggtagctgccagctcagacattggtgaccctcttcgagagctgggcagcgagtgtgggattgagttcgacgaggagaagacagctgtcattgaccatcacaactatgacgtctctgacctcggccagcatacgctcatcgtggccgaccccgagaacttgctgaaggccccaaccatcgttgggaggtcatcgctgaaccccatcctctttcgaggtgttgggatggtagctgatccggacaaccctttggtattggacatcctgacgggctcttctacctcttactccttcttcccagacaagcctatcacccagtacccccacgccgtggggaagaacaccctgctcattgctgggctgcaggccaggaacaatgcccgggtcgtcttcagtggctccctggacttctttagtgacgccttcttcaactctgcagtgcagaaggcggcgcccggctcccagaggtattcccaaacaggcaactatgaactagctgtggccctctcccgctgggtgttcaaggaggaaggtgtcctccgtgtagggcctgtgtcccaccatcgggtgggtgagacagccccacccaatgcctacaccgtcactgacctcgtggagtacagcattgtgattgagcagctctcaaatggaagatgggtcccctttgatggtgatgacattcagctggaatttgtccgcatcgatccttttgtgaggaccttcttgaagaaaaaaggtggcaaatacagcgtccagttcaagttgcctgatgtgtatggggtgttccagtttaaagtggattacaaccggctaggctacacgcacttacactcttccactcaggtgtccgtgaggccgctccagcacacgcwgtacgagcgcttcatcccctcggcctacccctactacgccagcgccttctccatgatgctggggctcttcatcttcagcacagtcttcttacacatgaaggagaaggagaaatctgactgaaggggcagagccaggrctcctgacgacaggcacttgggagttctgcgggcctgcgtcttcctcacagcgggctttgttctgttgttaaagctgtgggaccgtggcacagccttacctcagggragatgcggcactgagtaccgagggaggggggtggggatgaattttctgtgagtttttccacctaatgctaagtggtatttttcatatgtggtcactctcatttctaagataaacattgccctccmamwmhmaaaaaaaaaaaaaaaaaaaaaaaaaaaaaaaaaaaaaaaaaaaaaa

SEQ ID NO: 211080 - DNA, 1400 bp, Canis familiaris
tatgtgaccagacccagctcggatgacgaagatgacggggatgagaaagacatagaggataaggacaacatccccaaaccaggacacgtggctggggccagctcccaggattctggggccggatcaggcggggcccagctctggagtcgcaggcggaagcctgcccccgtggataactcccctggaccatctcactggccccagagggcacggcgcaagcacctgttcaccctgcagacagtgaactccaatgggaccagcgaccgctcaaccttcaacgaggatacccatgcccagccgtacattgccatcgattgggagccagagatgaagaagcgttactatgacgaggtggaggccgagggctacgtgaaacatgactgtgttgggtacgtgctgaagaaggctcctgtgcggctgcaggagtgcattgagctcttcaccactgtcgagactctggagaaggaaaatccctggttctgccccacctgcaagcagcaccagctggccaccaagaagctggacctgtggatgctgcccgagacactcatcatccacctgaagcgcttctcctataccaagttctcccgcgagaagctggacacccttgtggagtttcctatccgggacctggacttctctgagtttgtcatcaagccgcagaatgagtccgctccagagctgtacaaatatgatctcatcgcagtttccaatcattacgggggcctgcgtgacggacactacacaacatttgcttgcaacaaagacagcggccagtsssattacttcgatgacaacagtgtctcacctgtaactgagaatcagatcgagtccaaggcagcctatgtcctcttctaccaacgccaggatgtggcgcgtcgcctgcaaccccagcccagttcatctgaccccccggcatctcctgcctgcggttccccacccaactctgagttcatggatgtaaactaaggggctctgtccctgccacagggaaggaagccatctctgctctcttccttcccacatccatccacccccaccctcgccctcctacccgcgttaggtgccccgtgccaggcattgcaggcctgattgtggctactgttctcctgtgccgcttatattgctctctcccggggaagaggaggttgtgtctcctcccggcagtgtgttccccgcctgtgtttgccccttagagcattaatcttcccttctcttctctatttatggttgtccccttccctctgtcctcaacctggggtgttctgagggggtggtggtggggtgcacctgaacacagagtgtattttcttatcgagaccctgtaccttctgctgtgtatatataaagtgccagtgtgttcaaaaaaaaaaaaaaaaaaaaaaaaaaaaaaaaaaaaa

SEQ ID NO: 211081 - DNA, 595 bp, Canis familiaris; identical to SEQ ID NO: 974

SEQ ID NO: 211082 - DNA, 674 bp, Canis familiaris; identical to SEQ ID NO: 975

SEQ ID NO: 211083 - DNA, 678 bp, Canis familiaris; identical to SEQ ID NO: 976

SEQ ID NO: 211084 - DNA, 747 bp, Canis familiaris; identical to SEQ ID NO: 977

SEQ ID NO: 211085 - DNA, 672 bp, Canis familiaris; identical to SEQ ID NO: 978

SEQ ID NO: 211086 - DNA, 612 bp, Canis familiaris; identical to SEQ ID NO: 979

SEQ ID NO: 211087 - DNA, 625 bp, Canis familiaris; identical to SEQ ID NO: 980

SEQ ID NO: 211088 - DNA, 604 bp, Canis familiaris; identical to SEQ ID NO: 981

SEQ ID NO: 211089 - DNA, 583 bp, Canis familiaris; identical to SEQ ID NO: 982

SEQ ID NO: 211090 - DNA, 679 bp, Canis familiaris; identical to SEQ ID NO: 983

SEQ ID NO: 211091 - DNA, 690 bp, Canis familiaris; identical to SEQ ID NO: 984

SEQ ID NO: 211092 - DNA, 628 bp, Canis familiaris; identical to SEQ ID NO: 985
  misc_feature (24)..(24): n is a, c, g, or t

SEQ ID NO: 211093 - DNA, 621 bp, Canis familiaris; identical to SEQ ID NO: 986

SEQ ID NO: 211094 - DNA, 682 bp, Canis familiaris; identical to SEQ ID NO: 987

SEQ ID NO: 211095 - DNA, 594 bp, Canis familiaris; identical to SEQ ID NO: 988

SEQ ID NO: 211096 - DNA, 643 bp, Canis familiaris; identical to SEQ ID NO: 989

SEQ ID NO: 211097 - DNA, 701 bp, Canis familiaris; identical to SEQ ID NO: 990
  misc_feature (19)..(19): n is a, c, g, or t

SEQ ID NO: 211098 - DNA, 712 bp, Canis familiaris; identical to SEQ ID NO: 991

SEQ ID NO: 211099 - DNA, 1400 bp, Canis familiaris
ttgaatgtttcccgggaaactcttcagcaacataaactgcttaaggtgattagaaagaagcttgtccgtaaaactctggacatgatcaagaagattgctgatgagaagtacaatgatactttttggaaagaatttggtaccaacatcaagcttggtgtaattgaagaccactcaaatcgaacacgtcttgctaaacttcttagattccagtcatctcatcatccaagtgacataaccagtctagaccaatacgtggaaagaatgaaggagaagcaagacaaaatctacttcatggctgggtctagcagaaaagaggctgaatcttctccatttgttgagcgacttctgaaaaagggctatgaagtgatttatctcaccgaacctgtggacgaatactgcattcaggctcttcctgagtttgatgggaaaaggttccagaatgttgccaaagaaggtgtgaaatttgatgaaagtgagaaaacaaaggagagtcgtgaagcgattgagaaagaatttgagcctctgctcaactggatgaaagataaagctctcaaggacaagattgaaaaggccgtggtatctcagcgtctgacagagtctccgtgtgctctggtggccagccagtatggatggtctggcaacatggagagaatcatgaaagctcaagcataccagacgggcaaagacatctctacaaattactatgccagccaaaagaaaacatttgaaattaatcccagacatcccctgatcaaagacatgctgcgacgagttaaggaagatgaagatgacaaaacggtatcggatcttgctgtggttttgtttgagacagcaacgctgagatcaggctatctgctaccagacactaaagcatatggagatcgaatagaaagaatgcttcgcctcagtttaaacattgaccctgatgcaaaggtggaagaagaaccagaagaagaacccgaagagacaaccgaggacaccacagaagacacagagcaggacgatgaagaagaaatggatgcaggaacagacgacgaagaacaagaaacagtaaagaaatctacagctgaaaaagatgaattataaattatactctcaccatttggaacctgtgtggagagggaatgtgaaatttaagtcatttctttcgagagagacttgttttggatgctccccgcagcccccttctcccctgcactgtaaaatgttgggattgtgggtcacagaaagaagtgggttttttagttgaatttttttttttaacattcctcatgaatgtaaatttgtactatttaactgactattcttggtgtaaaatcttgtcatgtgtataaaaataaaaaagatcccaaataaaaaaaaaaaaaaaaaaaaaactcgaggggggggcccggtacccc

SEQ ID NO: 211100 - DNA, 1063 bp, Canis familiaris; identical to SEQ ID NO: 993

SEQ ID NO: 211101 - DNA, 430 bp, Canis familiaris; identical to SEQ ID NO: 994

SEQ ID NO: 211102 - DNA, 695 bp, Canis familiaris; identical to SEQ ID NO: 995

SEQ ID NO: 211103 - DNA, 629 bp, Canis familiaris; identical to SEQ ID NO: 996

SEQ ID NO: 211104 - DNA, 642 bp, Canis familiaris; identical to SEQ ID NO: 997

SEQ ID NO: 211105 - DNA, 693 bp, Canis familiaris; identical to SEQ ID NO: 998
  misc_feature (121)..(121): n is a, c, g, or t
  misc_feature (123)..(123): n is a, c, g, or t

SEQ ID NO: 211106 - DNA, 633 bp, Canis familiaris; identical to SEQ ID NO: 999

SEQ ID NO: 211107 - DNA, 662 bp, Canis familiaris; identical to SEQ ID NO: 1000

SEQ ID NO: 211108 - DNA, 514 bp, Canis familiaris; identical to SEQ ID NO: 1001

SEQ ID NO: 211109 - DNA, 720 bp, Canis familiaris; identical to SEQ ID NO: 1002
  misc_feature (60)..(60): n is a, c, g, or t

SEQ ID NO: 211110 - DNA, 958 bp, Canis familiaris; identical to SEQ ID NO: 1003

SEQ ID NO: 211111 - DNA, 613 bp, Canis familiaris; identical to SEQ ID NO: 1004

SEQ ID NO: 211112 - DNA, 643 bp, Canis familiaris; identical to SEQ ID NO: 1005

SEQ ID NO: 211113 - DNA, 675 bp, Canis familiaris; identical to SEQ ID NO: 1006

SEQ ID NO: 211114 - DNA, 746 bp, Canis familiaris; identical to SEQ ID NO: 1007

SEQ ID NO: 211115 - DNA, 774 bp, Canis familiaris; identical to SEQ ID NO: 1008

SEQ ID NO: 211116 - DNA, 608 bp, Canis familiaris; identical to SEQ ID NO: 1009

SEQ ID NO: 211117 - DNA, 419 bp, Canis familiaris; identical to SEQ ID NO: 1010

SEQ ID NO: 211118 - DNA, 964 bp, Canis familiaris; identical to SEQ ID NO: 1011
  misc_feature (14)..(14): n is a, c, g, or t

SEQ ID NO: 211119 - DNA, 717 bp, Canis familiaris; identical to SEQ ID NO: 1012

SEQ ID NO: 211120 - DNA, 648 bp, Canis familiaris; identical to SEQ ID NO: 1013

SEQ ID NO: 211121 - DNA, 616 bp, Canis familiaris; identical to SEQ ID NO: 1014

SEQ ID NO: 211122 - DNA, 631 bp, Canis familiaris; identical to SEQ ID NO: 1015

SEQ ID NO: 211123 - DNA, 619 bp, Canis familiaris; identical to SEQ ID NO: 1016

SEQ ID NO: 211124 - DNA, 629 bp, Canis familiaris; identical to SEQ ID NO: 1017

SEQ ID NO: 211125 - DNA, 600 bp, Canis familiaris
gccctaccaccagctttgagtctgctgcctgccctggctggttcctctgcacagcactggaggccgaccggcytgtcagcctcaccaacagaccagaagaggccatgatggtcactaagttctacttccagaaggaataatagwgtstmcwtkmcgtgcttcccccccactcccaacacatcaatgactccagagatgcctctccattctgcctggggtctcctggctgtggtggaggctctgaggagcagcctcggtggggtggaccctcagaaggatgtatgagagccctggtaacgggaccctgcctccagcctcctcagctagccaacctcaatgctgccaccacagtggtctttctaaagtgcacctctagctgcagcactgctccaggcctttcagggctgcctctgccttctggattaaagccaggctgcttggccagcctggccccctgctctcctctccgtaactccttgctctcctcccttgccccatgtccatgtcctggatccctcctgcccctttgctggcctcccaaaccttgtgttttgcaaaccgaaaaaaaaaaaaaaacgatccggtacctctagatcagaa

SEQ ID NO: 211126 - DNA, 627 bp, Canis familiaris; identical to SEQ ID NO: 1019

SEQ ID NO: 211127 - DNA, 616 bp, Canis familiaris; identical to SEQ ID NO: 1020

SEQ ID NO: 211128 - DNA, 624 bp, Canis familiaris; identical to SEQ ID NO: 1021

SEQ ID NO: 211129 - DNA, 780 bp, Canis familiaris; identical to SEQ ID NO: 1022

SEQ ID NO: 211130 - DNA, 769 bp, Canis familiaris; identical to SEQ ID NO: 1023

SEQ ID NO: 211131 - DNA, 689 bp, Canis familiaris; identical to SEQ ID NO: 1024

SEQ ID NO: 211132 - DNA, 629 bp, Canis familiaris; identical to SEQ ID NO: 1025

SEQ ID NO: 211133 - DNA, 620 bp, Canis familiaris; identical to SEQ ID NO: 1026

SEQ ID NO: 211134 - DNA, 669 bp, Canis familiaris; identical to SEQ ID NO: 1027

SEQ ID NO: 211135 - DNA, 708 bp, Canis familiaris; identical to SEQ ID NO: 1028

SEQ ID NO: 211136 - DNA, 645 bp, Canis familiaris; identical to SEQ ID NO: 1029
  misc_feature (18)..(18): n is a, c, g, or t

SEQ ID NO: 211137 - DNA, 651 bp, Canis familiaris; identical to SEQ ID NO: 1030

SEQ ID NO: 211138 - DNA, 677 bp, Canis familiaris; identical to SEQ ID NO: 1031

SEQ ID NO: 211139 - DNA, 677 bp, Canis familiaris; identical to SEQ ID NO: 1032

SEQ ID NO: 211140 - DNA, 616 bp, Canis familiaris; identical to SEQ ID NO: 1033

SEQ ID NO: 211141 - DNA, 613 bp, Canis familiaris; identical to SEQ ID NO: 1034

SEQ ID NO: 211142 - DNA, 636 bp, Canis familiaris; identical to SEQ ID NO: 1035

SEQ ID NO: 211143 - DNA, 709 bp, Canis familiaris; identical to SEQ ID NO: 1036

SEQ ID NO: 211144 - DNA, 648 bp, Canis familiaris; identical to SEQ ID NO: 1037

SEQ ID NO: 211145 - DNA, 695 bp, Canis familiaris; identical to SEQ ID NO: 1038

SEQ ID NO: 211146 - DNA, 655 bp, Canis familiaris; identical to SEQ ID NO: 1039

SEQ ID NO: 211147 - DNA, 646 bp, Canis familiaris; identical to SEQ ID NO: 1040

SEQ ID NO: 211148 - DNA, 614 bp, Canis familiaris; identical to SEQ ID NO: 1041

SEQ ID NO: 211149 - DNA, 502 bp, Canis familiaris; identical to SEQ ID NO: 1042
  misc_feature (119)..(119): n is a, c, g, or t

SEQ ID NO: 211150 - DNA, 1400 bp, Canis familiaris
acattctctggctgtctttgagttttgttgactgtatcctttgctgtgcaaaagcttcttatcttgatgaagtcccaatagttcatttttgcttttgtttcttttgccttcgtggatgtatcttgcaagaagttactatggccgagttcaaaaagggtgttgcctgtgttcttctctaggattttgatggaatcttgtctcacatttagatctttcatccattttgagtttatctttgtgtatggtgaaagagagtggtctagtttcattcttctgcatgtggatgtccaattttcccagcaccatttattgaagagactgtctttcttccaatggatagtctttcctcctttatcgaatattagttgcccataaagttcagggtccacttctggattctctattctgttccactgatctatgtgtctgaagatatttgcaaatgacatatcagataaagggctagtttccaagatctataaagaacttattaaactcaacaccaaagaaacaaacaatccaatcatgaaatgggcaaaagacatgaacagaaatctcacagaagaagacatagacatggccaacatgcacatgagaaaatgctctgcatcacttgccatcagggaaatacaaatcaaaaccacaatgagataccacctcacaccagtgagaatgggaaaaattaacaaggcaggaaacaacaaatgttggagaggatgtggagaaaagggaaccctcttacactgttggtgggaatgtgaactggtgcagccactgtggaaaactgtgtggaggttcctcaaacagttaaaaatatacctgccctacgacccagcaattgcactgttggggatttaccccaaagatacaaatgcaatgaaacgctgggacacctgcaccccgatgtttctagcagcaatggccacgatagccaaactgtggaaggagcctcggtgtccaacgaaagatgaatggataaagaagatgtggtttatgtatacaatggaatattactcagctattagaaatgacaaatacccaccatttgcttcaacgtggatggaactggagggtattatgctgagtgaagtaagtcagtcggagaaggacaaacattatatgttctcattcatttggggaatataaataatagtgaaagggaaaataagggaagggagaagaaatgtgtgggaaatatcagaaagggagacagaacataaagactgctaactctgggaaacgaactaggggtggtagaaggggaggagggcggggggtgggagtgaatgggtgacgggcactgggtgttattctgtatgttagtaaattgaacaccaataaaaataaaataaaataaaataaaataaaataaaataaaaaaaaaaataacattctctggc

SEQ ID NO: 211151 - DNA, 648 bp, Canis familiaris; identical to SEQ ID NO: 1044

SEQ ID NO: 211152 - DNA, 426 bp, Canis familiaris; identical to SEQ ID NO: 1045

SEQ ID NO: 211153 - DNA, 663 bp, Canis familiaris; identical to SEQ ID NO: 1046

SEQ ID NO: 211154 - DNA, 600 bp, Canis familiaris
taaatacttagtcattcagaggaggccataaatgagtgtttcttcaacaagggaaggtctgattccaaagagctgaaaaaatggttggatagcatttctctcttccatctatccttttattcacaatatacattgttaagaattaagagtctctgtaatcaagagatwacacttgccaccttgttgggcaagttgttagagaactatgatttgtctgcttggtattatttcaataatagtttttgcattatgattctaagtaactaataaaaaaagacccaggcccttgtatgttctaaaatactgtgctgtgtgtgtgtgtgtgtgtgtgtatacatacatcctgtgccttcctacctattccccagggccaccaagttttaagattcgacttcttatgcatttcctttcatctgtttccttgtttcagtgttcaacactattgacacagttgagggctccatcttctcttgcctawgcattgcaaaagcccagactctttcaatggtctcccttgctcactggcttcccaaccccatctcccatctaccttatcaccacctccaattatccttgcaaatcatgggcctgwcctctaga

SEQ ID NO: 211155 - DNA, 515 bp, Canis familiaris; identical to SEQ ID NO: 1048
  misc_feature (36)..(36): n is a, c, g, or t
  misc_feature (41)..(41): n is a, c, g, or t
  misc_feature (44)..(44): n is a, c, g, or t
  misc_feature (482)..(482): n is a, c, g, or t
  misc_feature (487)..(488): n is a, c, g, or t
  misc_feature (497)..(497): n is a, c, g, or t
  misc_feature (503)..(503): n is a, c, g, or t

SEQ ID NO: 211156 - DNA, 519 bp, Canis familiaris; identical to SEQ ID NO: 1049

SEQ ID NO: 211157 - DNA, 366 bp, Canis familiaris; identical to SEQ ID NO: 1050

SEQ ID NO: 211158 - DNA, 530 bp, Canis familiaris; identical to SEQ ID NO: 1051
  misc_feature (265)..(265): n is a, c, g, or t
  misc_feature (285)..(286): n is a, c, g, or t
  misc_feature (292)..(292): n is a, c, g, or t
  misc_feature (347)..(347): n is a, c, g, or t
  misc_feature (353)..(353): n is a, c, g, or t
  misc_feature (369)..(369): n is a, c, g, or t
  misc_feature (378)..(378): n is a, c, g, or t
  misc_feature (381)..(383): n is a, c, g, or t
  misc_feature (388)..(388): n is a, c, g, or t
  misc_feature (393)..(393): n is a, c, g, or t
  misc_feature (402)..(402): n is a, c, g, or t
  misc_feature (414)..(414): n is a, c, g, or t
  misc_feature (417)..(418): n is a, c, g, or t
  misc_feature (449)..(449): n is a, c, g, or t
  misc_feature (498)..(498): n is a, c, g, or t

SEQ ID NO: 211159 - DNA, 639 bp, Canis familiaris; identical to SEQ ID NO: 1052

SEQ ID NO: 211160 - DNA, 627 bp, Canis familiaris; identical to SEQ ID NO: 1053

SEQ ID NO: 211161 - DNA, 670 bp, Canis familiaris; identical to SEQ ID NO: 1054

SEQ ID NO: 211162 - DNA, 704 bp, Canis familiaris; identical to SEQ ID NO: 1055

SEQ ID NO: 211163 - DNA, 670 bp, Canis familiaris; identical to SEQ ID NO: 1056

SEQ ID NO: 211164 - DNA, 677 bp, Canis familiaris; identical to SEQ ID NO: 1057
  misc_feature (46)..(46): n is a, c, g, or t

SEQ ID NO: 211165 - DNA, 600 bp, Canis familiaris
tccagggtttcgtggacmtcattcagttccacgttgtccctttctgtycggtttccatgcagctttttcattagttccggcaactcctactgtatgtagttggacaatctcagggtgaccagataccgggattcgtccagagtcctttccgcgaatcttctgaaaagtggaccgcattgttgcaagaccctcctaacaacacctgcacgtgacagggaggtcacccacggakggacgtgcctaaagacccaatgagarttcattataatgcagtcgagaggrraatcygaccagtktctgtcacacacacatacatacacacacacacacacacacacacacacacacwacacayatgcrcgtacgcagagcatttaaacagttcgaatgtggagtgacggcactctaccaggacacgttacaagtttaggaatttcatttcctgttcggaacaccggcagcattcacccacacaatataatctaagagggcttatgattctttgtctgacagtgcttctcatgtgccttcccatagcaggtaaacgacctatagtagtcaagagactctatttagggtttggcattctgggtcctctag

SEQ ID NO: 211166 - DNA, 446 bp, Canis familiaris; identical to SEQ ID NO: 1059
  misc_feature (11)..(11): n is a, c, g, or t
  misc_feature (103)..(103): n is a, c, g, or t
  misc_feature (335)..(335): n is a, c, g, or t
  misc_feature (348)..(348): n is a, c, g, or t
  misc_feature (361)..(361): n is a, c, g, or t
  misc_feature (384)..(385): n is a, c, g, or t
  misc_feature (428)..(428): n is a, c, g, or t
  misc_feature (431)..(431): n is a, c, g, or t

SEQ ID NO: 211167 - DNA, 927 bp, Canis familiaris; identical to SEQ ID NO: 1060

SEQ ID NO: 211168 - DNA, 663 bp, Canis familiaris; identical to SEQ ID NO: 1061

SEQ ID NO: 211169 - DNA, 348 bp, Canis familiaris; identical to SEQ ID NO: 1062

SEQ ID NO: 211170 - DNA, 246 bp, Canis familiaris; identical to SEQ ID NO: 1063

SEQ ID NO: 211171 - DNA, 285 bp, Canis familiaris; identical to SEQ ID NO: 1064

SEQ ID NO: 211172 - DNA, 665 bp, Canis familiaris; identical to SEQ ID NO: 1065

SEQ ID NO: 211173 - DNA, 659 bp, Canis familiaris; identical to SEQ ID NO: 1066

SEQ ID NO: 211174 - DNA, 544 bp, Canis familiaris; identical to SEQ ID NO: 1067

SEQ ID NO: 211175 - DNA, 600 bp, Canis familiaris
  misc_feature (230)..(230): n is a, c, g, or t
ccagatggccatcatatcatagcgtaaatgtcagaagggcctttggggtcacccaaaatatctttccttggccctgctgtaaagcccataacactgcaatagcataggtgggagtacagacctctccattctggccagcctcagtccaggaggccggagcctgggtccatctgagggtatccaagtcctgtctaggatttggaaggtgtccaggaaaacaggaagggaancaatgagggatgcatmtactcactcttggcccaccatcttggatwtgagaktggadgartwtcacaagttctgctccamtcaatttwtagtgcgtgctccccgccacacacacacacacacacacacacacacacatacacacacacacacacagaggcctccttgactcccacaaagccctggccagtcatgctccacttagcaaccacattgagctgtcttcttataacactttattttatagcatttttgtacctcaggtgcagagacccgagttaatcataatcctcagtaaagcacacacagactttttctttctttgttttgtgtattttactttcccttttatcccatctccctcccattcct

SEQ ID NO: 211176 - DNA, 646 bp, Canis familiaris; identical to SEQ ID NO: 1069

SEQ ID NO: 211177 - DNA, 632 bp, Canis familiaris; identical to SEQ ID NO: 1070

SEQ ID NO: 211178 - DNA, 670 bp, Canis familiaris; identical to SEQ ID NO: 1071

SEQ ID NO: 211179 - DNA, 650 bp, Canis familiaris; identical to SEQ ID NO: 1072

SEQ ID NO: 211180 - DNA, 674 bp, Canis familiaris; identical to SEQ ID NO: 1073

SEQ ID NO: 211181 - DNA, 600 bp, Canis familiaris
atgtgaaagaaaaacatctttgtccagatgagctgtttcctgattcttctaagccattttgggcactggtggtggttggtgcagtcctagttttctatagcttgctagtaacagtggctctttgtgcctactggataaagagtaagagtagcaggatccttcagagtgactacatgaacatgaccccccgggaggccggggcccacccgaaggcactaccaaccctatgccccagcacgsgactttgcagcataccgctcctgacatggacgcctatccagatgcgagccggctggcagctcttcacctgctcaacacaactgctctggataggaaaaacccgcctcgtcttcagccggccatgggckccttttaggggctcttattaggccwccgatgccaatttttcttgaatgactatmccaaataacattattttgagactctgaaatgaagttaaagaatattactgtggcaggctctatcttgcagtgccatgacccaaattccaacttaccatgtatttattgacttgaggttacagtagaaaacaaaacaaaaaaagcaatggattctattaaaaaaaaaaaaaaaaaaaaa

SEQ ID NO: 211182 - DNA, 600 bp, Canis familiaris
  misc_feature (500)..(500): n is a, c, g, or t
ggttcagttccagccgccgaggtgacctggccaccattcatggcatgaaccgacccttcctgctcctcatggccaccccactggagagggcccagcacctgcacagctcccggcagcgccgggccctggacaccaactactgcttcagctccacggagaagaactgctgcgtccggcagctctacwttgacttccgcaaggatctgggctggaagtggatccatgagcccaagggttaccacgctaacttctgcctggggccctgcccctacatttggagcctggacacgcagtacagcaaggtcctggccctgtacaaccagcacaacccgggcgcgtcggcggcgccgtgctgcgtgccgcaggcgctggagccactgcccatcgtgtactacgtgggccgcaagcccaaggtggagcagctgtcgaacatgatcgtgcgctcctgcaagtgcagctgaggccccgccccgtccggcaggccccgcccaccggcaggnccggccccgcccccgcccgctgcgccgggctgtatttaaggacaccgcgccccaggcatccccccccatcccccggggtccattaaaggtggagagaggg

SEQ ID NO: 211183 - DNA, 643 bp, Canis familiaris; identical to SEQ ID NO: 1076

SEQ ID NO: 211184 - DNA, 657 bp, Canis familiaris; identical to SEQ ID NO: 1077
  misc_feature (7)..(7): n is a, c, g, or t

SEQ ID NO: 211185 - DNA, 600 bp, Canis familiaris
gtttcacatgctggtggctgacggcaatcagtactgatttgaaattcagtgtcaaaagtagcagaggcttctctgacccccaaggggtgacatgtggagcagtgacactttcagcagagagggtcagagtggacaacagggattataasaagtacacagtggagtgtcaggarggcagtgcctgcccctctgccgaggagagcctacccatcgaggtcgtggtggatgctattcmcaagctcaagtatgaaaactacaccagcagcttcttcatcagagacatcatcaaaccagacccacccacaaacctgcagctgaagccattgaaaaattctcggcacgtggaggtcagctgggaataccccgacacctggagcaccccacattcctacttctccctgacattttgcrtacaggcccagggcaagaacaatagagaaaagaaagatagactctgcgtggacaagacctcagccaaggtcgtgtgccacaaggatgccaagatccgcgtgcaagcccgagaccgctactatagttcatcctggagcgactgggcatctgtgtcctgcagttaggttccacccccaggatgaatcttgg

SEQ ID NO: 211186 - DNA, 1400 bp, Canis familiaris
cagcttttgtcctttctgcagctctctgtgaagctgcagttctgtcaagagtcagttcagracttcgatgccagtgtataaaaacacactccacacctttccatcccaaatatattraagaactgagagtgattgacagtggcccacattgtgaaaactcagaaatcattgtaaagcttttcaatggaaatgaggtgtgcctggaccccaaggaaaaatgggtacaaaaggttgtgcagatatttctaaagaaggctgagaaacaagatccgtgaaacaacaaacacattctctgtggtttccaagaattcctcaggaaagatgccaatgagacttcaaaaaaatctatttcagtacttcatgtcccgtgtagacctggtgtaggattgccagataaaaatacagtatgcccagttagatttgaatattaagtaaaacaatgaatagtttttttctaaagtctcatatatgttgccctattcaatgtctaggcacacttacattaaacatattattcattgtttgctgtaaattcaaatgtagctggaaatcctggatatattttgttgttgttacatctttccacctcacctacaggccaggatgcatgagtcccttttcaaccttgccttggtctcttctttattcctcaactggagaaaaggtatcagcaagcatcctacctcacagaaatatgaggacatatggaagcactttaactttttctcatgttgtctaaattatgttcaagtgaaacttgtttgcctatttattatttatgtatttatttaagaaacaaatatgggaatatctgtgcataaatttggaaaaataggaaaggaagcattgttgataagttagtataatgatggtagtgaatttatatttattttggtatttagtgatgttatattaaagaactattttgtttttttttttttaaagaactattttgaacaaggttgctagatttagcaaaattaaaaatgagatactcatttaattttgatttcaaacaataattttttattatattattatttatctgaaatttcaattgaaccgcaatcctacttttgatactcctagtcttgtctattcactgacagccttgttcaatgctgggttgaatgatcataaccctgagttagaattgtttctccaaagagcaaaaactcgacaagcaatattaatgaagtaatttcttgccagttaaaatttgtatatttataatatacaaaatagattccttataattttacttattgtgttcttaaacactgacttttttactttaagatgcttttatatgtttcccaagagatttttttttcctcctatttttgatgctatggaaataaaaatgtaaaatatttaaaataaaacttattgtcaaagtc

SEQ ID NO: 211187 - DNA, 419 bp, Canis familiaris; identical to SEQ ID NO: 1080
  misc_feature (266)..(266): n is a, c, g, or t
  misc_feature (336)..(336): n is a, c, g, or t

SEQ ID NO: 211188 - DNA, 659 bp, Canis familiaris; identical to SEQ ID NO: 1081

SEQ ID NO: 211189 - DNA, 659 bp, Canis familiaris; identical to SEQ ID NO: 1082

SEQ ID NO: 211190 - DNA, 641 bp, Canis familiaris; identical to SEQ ID NO: 1083

SEQ ID NO: 211191 - DNA, 687 bp, Canis familiaris; identical to SEQ ID NO: 1084

SEQ ID NO: 211192 - DNA, 657 bp, Canis familiaris; identical to SEQ ID NO: 1085

SEQ ID NO: 211193 - DNA, 661 bp, Canis familiaris; identical to SEQ ID NO: 1086

SEQ ID NO: 211194 - DNA, 695 bp, Canis familiaris; identical to SEQ ID NO: 1087

SEQ ID NO: 211195 - DNA, 509 bp, Canis familiaris; identical to SEQ ID NO: 1088

SEQ ID NO: 211196 - DNA, 666 bp, Canis familiaris; identical to SEQ ID NO: 1089

SEQ ID NO: 211197 - DNA, 880 bp, Canis familiaris; identical to SEQ ID NO: 1090

SEQ ID NO: 211198 - DNA, 325 bp, Canis familiaris; identical to SEQ ID NO: 1091

SEQ ID NO: 211199 - DNA, 675 bp, Canis familiaris; identical to SEQ ID NO: 1092

SEQ ID NO: 211200 - DNA, 690 bp, Canis familiaris; identical to SEQ ID NO: 1093

SEQ ID NO: 211201 - DNA, 1400 bp, Canis familiaris
tggacattttatatccaagtcatgacttttagtcaggcagaaacttttccattcaatccatttgatcttaccaagatttggcctcaccaagactaccctcttatcccagttggtaaactggtcttaaaccggaatccagttaattacttcrctgaggttgaacagatggcatttgacccaagcaacatgccacctggcattgagcccagccctgacaaaatgcttcagggtcgtctttttgcctatcctgacactcaccgccaccgcctgggacccaactatcttcagatacctgtgaactgtcctttccgggctcgagtggccaactaccaacgggatggccccatgtgcatgctcgacaatcagggtggtgctccaaattactaccccaatagctttagtgctcctgaacaacagcgttgtgtcctagagcatagcagccaatgttcgccagatgtgcagcgcttcaacagtgccaatgaagataatgtcactcaggtgcggaccttctatttgaaggtacttggtgaagaggagaggaaacgcctgtgcgagaacattgctggccatctgaaggacgcacaacttttcatccagaagaaagcggtcaagaacttcagtgatgtccaccctgactacggggcccgcattcaggctcttttggacaaatacaatgctgagaaacctaagaacgcgattcacacctttatgcagcatgggtctcacctggctgccagggaaaaagccaatctgtgagagtcgtgccccaggttgctctccacctgtgaagcaaagcgtggtgttcgcacacgtacccacccttcgctggatagaagattctcctgtgctaggtgcgcagatgcaagcttacgcctttaaaataagccaggtttctatcgcaagtaatgtagcagtggcttttaatgctatttccctagggggaagtaagggtagggcttaacaatgatataaaagaaaatgtatttgcttttggcrgtgggttggattattcacttaaaatgactagaatgaaagtttctggcagaaatatgattttatttgataagataaagtcttggtgaaattagtatgtttatatatatcatctcatggccttattaaataaaagtgtggctgtaattatgtaagaagaaaagatgatctacccagaaatttaaatttttctcagttccatatgggaaaaacacatttaatgcattgatgtcttttgaaaataacttcagtgacatcatagcttaatgcttattcctgcctggaattgatcagatttttttaaaacctggaattacattcatgctaatatagcattgattttacaacagactgatttgtaactgctacatttttacaataaaataatctgtacataaaaaaaaaaa

SEQ ID NO: 211202 - DNA, 693 bp, Canis familiaris; identical to SEQ ID NO: 1095

SEQ ID NO: 211203 - DNA, 1400 bp, Canis familiaris
aatcggccctgttggtgctcgtggtcctgctggaccccaaggcccccgtggtgacaagggtgagacaggcgaacagggtgacagaggcataaagggtcaccgtggcttctctggtcttcagggtcctcctggccctcccggctctcctggtgaacaaggtccttctggagcttctggtcctgctggtccccgaggtccccctggctctgctggttctcctggcaaagacggactcaacggtctcccaggccccattggcccccccggtcctcgtggtcgcactggtgatgccggtcctgttggtcccccyggccctcctggaccccctggtccccccggtcctcccagcggcggtttcgacttcagcttcctgccccagccacctcaggagaaggctcacgatggcggccgctactaccgggccgatgatgccaacgtggtccgtgaccgtgacctcgaggtagacaccaccctcaagagcctgagccagcagatcgagaacatccggagccctgaaggaagccgcaagaaccctgcccgcacctgccgcgacctcaagatgtgccactccgactggaagagcggagaatactggattgaccccaaccaaggatgcaacctcgatgccatcaaggttttctgcaacatggagacaggtgagacctgcgtataccccactcagccccaggtggcccagaagaactggkacatcagcargaaccccaaggagaagagacacgtctggtacggcgagagcatgaccgacggattccagttcgagtatggtggccagggctccgatcctgccgatgtggccatccagctgaccttcctgcgcctgatgtccaccgaggcctcccagaacatcacctaccactgcaagaacagcgtggcctacatggaccagcagaccggcaacctcaagaaggccctgctcctccagggttccaacgagatcgagatccgggccgagggcaacagccgcttcacctacagtgtcacctacgacggctgcacgagtcacactggagcctggggcaagacagtgatcgaatacaaaaccaccaagacctcccgtttgcccatcatcgatgtggcaccattggacgttggcgccccagaccaggaattcggcatggatattggccctgtctgcttcctgtaaactccctcccacccaacctggctccctcccacccaaccccctcacccctgaccctggaaacagacaaacaacccaaactgaaccccccaaaaagccaaaaaatgggagacaatttcacatggactttggaaaatatttttttcctttgcattcatctctcaaacttagtttttatctttgaccaactgaacatgaccaaaaaccaaaagcacattcaaccttaccaaaaaaaaaa

SEQ ID NO: 211204 - DNA, 655 bp, Canis familiaris; identical to SEQ ID NO: 1097

SEQ ID NO: 211205 - DNA, 671 bp, Canis familiaris; identical to SEQ ID NO: 1098

SEQ ID NO: 211206 - DNA, 468 bp, Canis familiaris; identical to SEQ ID NO: 1099

SEQ ID NO: 211207 - DNA, 727 bp, Canis familiaris; identical to SEQ ID NO: 1100

SEQ ID NO: 211208 - DNA, 600 bp, Canis familiaris
acaggtggccatgacagcccccatggacaacatgaattgtctacagtggagggcmmaaacatcctctgggagcttcttcctgtttctttccccagctacccatcctgcaaggcaatatttctggaatgcctccatatttaaagaagattccttgagacagtccatctttctgcgctagtgacagtaagagaagtttttaatttctctcagaaaagcgaaaaaagggaagcttttacgggaaggagaggaggacttcattgctgttctaatgtgttcagtggggagaaaakttaagacttccggtgctgcctggggcatgttctggggctctagttctcccaggcgttaggatcagatcaaagatatttggatactatcaaacgctggtcccaggtttaattagacttctgaatcttcttgagaccaaagagtggtccacattgaacatgctgagggagtcagccacctctgagggtcctgtaactctctcccctcaggagtactgagaaccatcatgaaagtgctgctctaggccacgtgtaactatgctgttaacasctgtatcatagacawtaaaaattatattgtgtgaaaaaaaaa

SEQ ID NO: 211209 - DNA, 1400 bp, Canis familiaris
tggatacccccctcatccaatctgaatctcccaaggaggggagccatcttacaaactcttcttgatggtgggatttaaagtttaggatccctaaaagcatttggcaaacatttgttaaatgattgacttaaaaatgaatgagcctctattcaggcccacctcatggtggactcagggggcctcttagtggatcactcttaaaagcacatgaattcagttccacccgggactggactacacctactactggacacacctgagggcagttccccttttaagagtctgccattacaagctccaagttgcttcattctatattcaaagcatcacttgttgcataagcacagaagtctaaaaaaatttactggccatgctgtcatgttttttttaaatgccaatattgacaggtcagccattttatttgtataattgtggaaggtgggggatgttatacttttctaagagaatgcactctccaaagcactgggggctcacaagaggaattcttcaacgatggggcaaacgaacttaaagacaggattattttcctcaccaaatacatagttaaaggctatttctgtgtcacattcttatgccctcacttagcctggagtgagctatgggctgaggaagtcaggttgttagcatattctggcaacatcccacccctaacgtgccacgcaacctcctttggcttatctgtggaagcactgggttagatggttgccttttactggaagaggagcaacaattagacaagagtccactctttggagaccaggcctcacctcttggagggcccaggaacacccatacaggtggccatgacacccccatggacaacatgaattgtctacagtggaggcccaaacatcctctgggagcttcttcctgtttctttccccagctacccatcctgcaaggcaatatttctggaatgcctccatatttaaagaagattccttgagacagtccatctttctgcgctagtgacagtaagagaagtttttaatttctctcagaaaagcgaaaaaagggaagcttttacgggaaggagaggaggacttcattgctgttctaatgtgttcagtggggagaaaagttaagacttccggtgctgcctggggcatgttctggggctctagttctcccaggcgttaggatcagatcaagatatttggatactatcaaacgctggtcccaggtttaattagacttctgaatcttcttgagaccaaagagtggtccacattgaacatgctgagggagtcagccacctctgagggtcctgtaactctctcccctcaggagtactgagaaccatcatgaaagtctgctctaggccacgtgtaactatctgttaacacctgtatcatagacaataaaaattatattgtgtg

SEQ ID NO: 211210 - DNA, 557 bp, Canis familiaris; identical to SEQ ID NO: 1103
  misc_feature (5)..(5): n is a, c, g, or t
  misc_feature (67)..(67): n is a, c, g, or t
  misc_feature (74)..(74): n is a, c, g, or t
  misc_feature (77)..(77): n is a, c, g, or t
  misc_feature (79)..(79): n is a, c, g, or t
  misc_feature (82)..(82): n is a, c, g, or t
  misc_feature (553)..(553): n is a, c, g, or t

SEQ ID NO: 211211 - DNA, 583 bp, Canis familiaris; identical to SEQ ID NO: 1104

SEQ ID NO: 211212 - DNA, 400 bp, Canis familiaris; identical to SEQ ID NO: 1105

SEQ ID NO: 211213 - DNA, 367 bp, Canis familiaris; identical to SEQ ID NO: 1106
  misc_feature (340)..(340): n is a, c, g, or t

SEQ ID NO: 211214 - DNA, 600 bp, Canis familiaris
agmatacagtaggcataaatatctgtgaagctcagctgaagttaaatatatatgtttatctgatattgtacatatcagcataaatatatgcacataacagttgggggttttgtttcggttttaaattccatgatactgctgtcctctgagcctctctccatagaawtaggggtctgactgaaggtatctatcatccaragtccatgtatatctacagcagtgtttcccagtatktttatattatcccactgctattattagacacwktkgtycaatcacmcawrccctgtgwagwtttaataccacacacacacacacacacacacacacacacacacaatawctctttatgtastgtggccctttctttggagggtctataatcattatracatgtaagaatttttgctcctcaaaatcaattttcacccattggggcaatatwgcccttsttgacaatgtactatctatctatatytccatgtctatctgtcwgtctctgtttatatctatcatgtttcttaatctagggagaaarggagtscgggagggaaggaaggaggaagagagaaagaaggagagacaaaatgtccaattgtc

SEQ ID NO: 211215 - DNA, 399 bp, Canis familiaris; identical to SEQ ID NO: 1108

SEQ ID NO: 211216 - DNA, 367 bp, Canis familiaris; identical to SEQ ID NO: 1109

SEQ ID NO: 211217 - DNA, 415 bp, Canis familiaris; identical to SEQ ID NO: 1110

SEQ ID NO: 211218 - DNA, 731 bp, Canis familiaris; identical to SEQ ID NO: 1111

SEQ ID NO: 211219 - DNA, 379 bp, Canis familiaris; identical to SEQ ID NO: 1112
  misc_feature (242)..(242): n is a, c, g, or t
  misc_feature (334)..(334): n is a, c, g, or t

SEQ ID NO: 211220 - DNA, 389 bp, Canis familiaris; identical to SEQ ID NO: 1113

SEQ ID NO: 211221 - DNA, 427 bp, Canis familiaris; identical to SEQ ID NO: 1114
  misc_feature (189)..(189): n is a, c, g, or t

SEQ ID NO: 211222 - DNA, 600 bp, Canis familiaris
gctgggcagcagggagggacagtcaagggaacacaaaacgcagtcatcgggattgaaaaaatgtcagggcactggggtctggaccaaggcccagcgtctcacctctggcatggagctgcaggcccggtgcttccccttcccaatacggcctagggagaaacaagcctttctttcagcttctgcaaaccacccactctcctgcccagcagctaggccacagcaactctgggccagcttggagcttctagaagccatatttacctgcctacatttaatgaagagctgattccccagtgtcacccttgtctcaaagagcttagaaacaaaaagtaggaaattcagatggactcaccttccctagggatgttcacaggtcccagattccagcttctttgctgggtgagcccgtcttaatagctccactccattctccattctggagagtccttggtgcaaagctggccagaactctgggcatctgaatcgagctgcctacataactgcccccccccccccccataaccaaaacacgaagctctagctctccctggctcagcctggagactaagcaaattggggcattaaaagctcagctcctat

SEQ ID NO: 211223 - DNA, 367 bp, Canis familiaris; identical to SEQ ID NO: 1116

SEQ ID NO: 211224 - DNA, 600 bp, Canis familiaris
  misc_feature (2)..(2): n is a, c, g, or t
  misc_feature (25)..(25): n is a, c, g, or t
  misc_feature (407)..(407): n is a, c, g, or t
  misc_feature (415)..(415): n is a, c, g, or t
tnggggactcgatcctgggaccccngggtcatggcctgagctgaaggcaggtactcaaccactgggccgcccaggagccccagtatttgtctttctctgttaattcactcagcataatgccttcagggttccccatgttgtaacaagtgataggatttcctcacttttttttatggctgaataatatccctgtgtgtgtgtgtgtgtgtgtgtgtgtgtgtgtgtatcacggcttctttatccctttcatcccgtcaatggataacttaaggttgtgtccgtgtcttggttattataaataatactgccctgcatgtgggggtgcagatgtgttttcaagttagggtttttatttcctttggatgtatttccagaagtggaatttcaggatcctgtggtagttctantaaaaatnttttggagggtcctccatactgttttatgtagtgactgtataaattgacgttcctaccaagtgcacaaaggttcccctttctccatatttttaacagcattttcttgtctttttggtggtggcccttctaccaagtgtggggtggtatctccttgtgcttttgatttgcgtttccctgatgattg

SEQ ID NO: 211225 - DNA, 399 bp, Canis familiaris; identical to SEQ ID NO: 1118

SEQ ID NO: 211226 - DNA, 407 bp, Canis familiaris; identical to SEQ ID NO: 1119

SEQ ID NO: 211227 - DNA, 826 bp, Canis familiaris; identical to SEQ ID NO: 1120

SEQ ID NO: 211228 - DNA, 772 bp, Canis familiaris; identical to SEQ ID NO: 1121

SEQ ID NO: 211229 - DNA, 690 bp, Canis familiaris; identical to SEQ ID NO: 1122

SEQ ID NO: 211230 - DNA, 672 bp, Canis familiaris; identical to SEQ ID NO: 1123

SEQ ID NO: 211231 - DNA, 726 bp, Canis familiaris; identical to SEQ ID NO: 1124

SEQ ID NO: 211232 - DNA, 700 bp, Canis familiaris; identical to SEQ ID NO: 1125

SEQ ID NO: 211233 - DNA, 1294 bp, Canis familiaris; identical to SEQ ID NO: 1126

SEQ ID NO: 211234 - DNA, 752 bp, Canis familiaris; identical to SEQ ID NO: 1127

SEQ ID NO: 211235 - DNA, 691 bp, Canis familiaris; identical to SEQ ID NO: 1128

SEQ ID NO: 211236 - DNA, 729 bp, Canis familiaris; identical to SEQ ID NO: 1129

SEQ ID NO: 211237 - DNA, 624 bp, Canis familiaris; identical to SEQ ID NO: 1130

SEQ ID NO: 211238 - DNA, 738 bp, Canis familiaris; identical to SEQ ID NO: 1131

SEQ ID NO: 211239 - DNA, 1400 bp, Canis familiaris
  misc_feature (681)..(681): n is a, c, g, or t
  misc_feature (800)..(800): n is a, c, g, or t
  misc_feature (813)..(813): n is a, c, g, or t
  misc_feature (1009)..(1009): n is a, c, g, or t
gataccaaggattctgaaacgaagctgaaggcgtcccagggggtgtgcaatgacaccatgatggccctctgggaggagtgcaagccctgcctgaaacagacctgcatgaagttctacgcacgtgtctgcagaagtggctcggggctagttggccaccagctcgaggagttcctgaaccagagttctcccttctacttctggatgaatggcgatcgtatcgactccctgctggagaacgaccggcagcagacccacgccctggacgtcatgcaggacagcttcaaccgggcatccagcatcatggatgagcttttccaggacagattcttcacccgggagccccaggatacttaccactactcacccttcagcttattccagaggaggcctttcttcaatcccaaatttcgcatcgcccggaacataatacctttccctagattccagcccttaaacttccatgacatgtttcagcccttctttgacatgatacaccaggctcaacaggccatggatgttaacctgcatagaattccttaccacttcccaattgaattcccagaagaagataaccgcaccgtgtgcaaggagatccgtcacaactccacaggkkgcctgraawtgaaggaccagtgtgrmaagtgccrggagatcttgtcaskgratkgktckbccracvrncbbgcssagbtccasytgcgacargdamywagtdatyccsyscagawbsyggagaagttcmccmrkctytwcsackakctkcyscagtcytdycaggagrwgatgtycdamacgtscknsytsbtgaagcwnctgdhcgrschktttadctggkygtcccvmctgkcwaacctcrctcvrrgtgdagaccymktckatctscmggtcacgacggtgggttctcagacttctgactccmmkgktccsgtgggcttcachaaggtgbtygtgaagctctttgattckgaycccatcmcggtgatgatccmmgaascmgtctycaggdrmnatcckraatttwtggagactgtgkcmgagaaggctcttcaggagkatcgcchaaagcmccgrgaggratgagawgtgmacmttgcttctcchaatatgggagggctgagttccttygaccccmasmtgagygctaggcccctrgagagagctctgcawgtcmccmmgkgaccaggccttscctcgaggcgctcctgtctcctaacccmgctktccttcctstggactccgcmctgtwamgcstacgtttgytgatcatgggaagaactcctgtgtgccmctaactcwwtwaaaccschmrggaawhwrvwwrwdahadwaaaawddraawwaawawavaaawwarrrarhraaaaaawaaawaaaaaaraaaaaaaaaaaaaaaaaaaaaa

SEQ ID NO: 211240 - DNA, 991 bp, Canis familiaris; identical to SEQ ID NO: 1133
  misc_feature (517)..(517): n is a, c, g, or t

SEQ ID NO: 211241 - DNA, 663 bp, Canis familiaris; identical to SEQ ID NO: 1134

SEQ ID NO: 211242 - DNA, 609 bp, Canis familiaris; identical to SEQ ID NO: 1135

SEQ ID NO: 211243 - DNA, 689 bp, Canis familiaris; identical to SEQ ID NO: 1136

SEQ ID NO: 211244 - DNA, 619 bp, Canis familiaris; identical to SEQ ID NO: 1137

SEQ ID NO: 211245 - DNA, 1054 bp, Canis familiaris; identical to SEQ ID NO: 1138

SEQ ID NO: 211246 - DNA, 614 bp, Canis familiaris; identical to SEQ ID NO: 1139

SEQ ID NO: 211247 - DNA, 715 bp, Canis familiaris; identical to SEQ ID NO: 1140

SEQ ID NO: 211248 - DNA, 655 bp, Canis familiaris; identical to SEQ ID NO: 1141

SEQ ID NO: 211249 - DNA, 836 bp, Canis familiaris; identical to SEQ ID NO: 1142

SEQ ID NO: 211250 - DNA, 776 bp, Canis familiaris; identical to SEQ ID NO: 1143
  misc_feature (380)..(380): n is a, c, g, or t

SEQ ID NO: 211251 - DNA, 678 bp, Canis familiaris; identical to SEQ ID NO: 1144
  misc_feature (415)..(417): n is a, c, g, or t

SEQ ID NO: 211252 - DNA, 935 bp, Canis familiaris; identical to SEQ ID NO: 1145

SEQ ID NO: 211253 - DNA, 597 bp, Canis familiaris; identical to SEQ ID NO: 1146

SEQ ID NO: 211254 - DNA, 975 bp, Canis familiaris; identical to SEQ ID NO: 1147

SEQ ID NO: 211255 - DNA, 606 bp, Canis familiaris; identical to SEQ ID NO: 1148

SEQ ID NO: 211256 - DNA, 612 bp, Canis familiaris; identical to SEQ ID NO: 1149

SEQ ID NO: 211257 - DNA, 645 bp, Canis familiaris; identical to SEQ ID NO: 1150

SEQ ID NO: 211258 - DNA, 651 bp, Canis familiaris; identical to SEQ ID NO: 1151

SEQ ID NO: 211259 - DNA, 821 bp, Canis familiaris; identical to SEQ ID NO: 1152

SEQ ID NO: 211260 - DNA, 631 bp, Canis familiaris; identical to SEQ ID NO: 1153

SEQ ID NO: 211261 - DNA, 772 bp, Canis familiaris; identical to SEQ ID NO: 1154

SEQ ID NO: 211262 - DNA, 729 bp, Canis familiaris; identical to SEQ ID NO: 1155

SEQ ID NO: 211263 - DNA, 987 bp, Canis familiaris; identical to SEQ ID NO: 1156
  misc_feature (985)..(985): n is a, c, g, or t

SEQ ID NO: 211264 - DNA, 724 bp, Canis familiaris; identical to SEQ ID NO: 1157

SEQ ID NO: 211265 - DNA, 680 bp, Canis familiaris; identical to SEQ ID NO: 1158

SEQ ID NO: 211266 - DNA, 771 bp, Canis familiaris; identical to SEQ ID NO: 1159

SEQ ID NO: 211267 - DNA, 740 bp, Canis familiaris; identical to SEQ ID NO: 1160

SEQ ID NO: 211268 - DNA, 764 bp, Canis familiaris; identical to SEQ ID NO: 1161

SEQ ID NO: 211269 - DNA, 711 bp, Canis familiaris; identical to SEQ ID NO: 1162

SEQ ID NO: 211270 - DNA, 719 bp, Canis familiaris; identical to SEQ ID NO: 1163

SEQ ID NO: 211271 - DNA, 693 bp, Canis familiaris; identical to SEQ ID NO: 1164

SEQ ID NO: 211272 - DNA, 681 bp, Canis familiaris; identical to SEQ ID NO: 1165

SEQ ID NO: 211273 - DNA, 600 bp, Canis familiaris
ccccactgttgaggttgacctctacacctccaaaggtctcttcagagctgctgtgcccagtggtgcctccactggtatctacgaggccctcgagctccgggacaatgacaagacacgctacatggggaaaggtgtctcaaaggctgttgagcacatcaataaaactattgcacctgccctgattagcaagaaagtgaatgttgtggagcaggaaaagattgacaaactgatgatcgagatggacgggacagagaataaatctaaatttggtgcaaacgccattctgggagtgtccctggctgtctgcaaggcgggggctgtcgagaagggggtgcccctgtaccgccacattgctgatttggctggcaattctgaagttatcctgccagttccggcyttcaatgtcatcaacggtggttcccatgctggcaacaagctggccatgcaggagttcatgatccttcccgtcggtgcagcgaacttcaaggaggccatgcgcattggagcagaggtttatcataacctgaagaatgtcatcaaggagaaatatggaaaagatgccaccaatgtgggcgatgaaggtggatttgctcctaatat

SEQ ID NO: 211274 - DNA, 796 bp, Canis familiaris; identical to SEQ ID NO: 1167
  misc_feature (238)..(238): n is a, c, g, or t

SEQ ID NO: 211275 - DNA, 751 bp, Canis familiaris; identical to SEQ ID NO: 1168

SEQ ID NO: 211276 - DNA, 692 bp, Canis familiaris; identical to SEQ ID NO: 1169

SEQ ID NO: 211277 - DNA, 723 bp, Canis familiaris; identical to SEQ ID NO: 1170
  misc_feature (439)..(439): n is a, c, g, or t

SEQ ID NO: 211278 - DNA, 758 bp, Canis familiaris; identical to SEQ ID NO: 1171

SEQ ID NO: 211279 - DNA, 696 bp, Canis familiaris; identical to SEQ ID NO: 1172

SEQ ID NO: 211280 - DNA, 680 bp, Canis familiaris; identical to SEQ ID NO: 1173

SEQ ID NO: 211281 - DNA, 763 bp, Canis familiaris; identical to SEQ ID NO: 1174

SEQ ID NO: 211282 - DNA, 708 bp, Canis familiaris; identical to SEQ ID NO: 1175

SEQ ID NO: 211283 - DNA, 755 bp, Canis familiaris; identical to SEQ ID NO: 1176
  misc_feature (660)..(660): n is a, c, g, or t
  misc_feature (666)..(666): n is a, c, g, or t
  misc_feature (696)..(696): n is a, c, g, or t
  misc_feature (724)..(724): n is a, c, g, or t
  misc_feature (742)..(742): n is a, c, g, or t
  misc_feature (749)..(749): n is a, c, g, or t

SEQ ID NO: 211284 - DNA, 600 bp, Canis familiaris
  misc_feature (469)..(469): n is a, c, g, or t
  misc_feature (521)..(521): n is a, c, g, or t
  misc_feature (533)..(533): n is a, c, g, or t
  misc_feature (550)..(550): n is a, c, g, or t
  misc_feature (570)..(570): n is a, c, g, or t
  misc_feature (599)..(599): n is a, c, g, or t
acctcctccatcgcaaggaaaggggcgaggactgtccctcagcagattagctggggagccgagggccagaagccgggatttggctacggaggccgcgctccagctcacaaggggctcaagggcaccgacgcccagggcacgctttccaaaatcttcaaactgggaggaagagatagtcgttccgggtcacccatggctagacgctgaagcccgcctcgtggccgcagaaccctgtcctcagcttcttaatatcaccgccttcgacgttaacaccgccccgtacctccccacccgtagcgagcaccctcctgcctaacgcccgtccagttgtgcccgcagcagggtcaggcgcgcccaggcccaccggcggtttcggccacgagcttcgatggaggaaacacagaccgggtattccacarscacgctgagcctggagacgacgcgtccccggggcctcagccccggcagngcagccccgggccgacgcgcgccttcgtcttcgaccgggtttggtgagccgnatccttcgcttngaagcgcttgccgtggncccgccgcggacaaaaaacnttgcaggcgcttaggaccgcggtccaggnt

SEQ ID NO: 211285 - DNA, 849 bp, Canis familiaris; identical to SEQ ID NO: 1178

SEQ ID NO: 211286 - DNA, 584 bp, Canis familiaris; identical to SEQ ID NO: 1179

SEQ ID NO: 211287 - DNA, 600 bp, Canis familiaris
  misc_feature (428)..(428): n is a, c, g, or t
  misc_feature (449)..(449): n is a, c, g, or t
  misc_feature (454)..(454): n is a, c, g, or t
  misc_feature (474)..(474): n is a, c, g, or t
  misc_feature (502)..(502): n is a, c, g, or t
  misc_feature (519)..(519): n is a, c, g, or t
  misc_feature (535)..(535): n is a, c, g, or t
  misc_feature (546)..(546): n is a, c, g, or t
  misc_feature (569)..(569): n is a, c, g, or t
  misc_feature (596)..(596): n is a, c, g, or t
  misc_feature (598)..(598): n is a, c, g, or t
tccacgttggccaggcaggtgtccagatcggcaatgcctgctgggagctctattgcctggaacacggcattcagcccgatggccagatgccaagtgacaagaccattgggggaggagatgactccttcaacaccttcttcagtgagacgggcgctggcaagcatgtgcccagggcagtgtttgtagacctggagcccacagtcattgatgaagttcgcactggcacctaccgccagctcttcaccctgagcagctcatcacaggcaaggaagatgctgccaataactatgcccgagggcactacaccattggcaaggagatcattgaccttgtcttggaccgaattcggaaactggctgaccaagtgcacgggtcttcagggcttttttggttttcacaactttggcgggggaactgggtctgggttnacttccttgttgatggaacgnttttntgtcgattatgggaagaagnccaagctagagttttcatttacccttgnccccaggtgtccacagntgagtagagcctaaantcatcttacancaacacctggaccttgatgtgcntttgtgaaagaggcattataattgggnanaa

SEQ ID NO: 211288 - DNA, 473 bp, Canis familiaris; identical to SEQ ID NO: 1181

SEQ ID NO: 211289 - DNA, 1011 bp, Canis familiaris; identical to SEQ ID NO: 1182

SEQ ID NO: 211290 - DNA, 719 bp, Canis familiaris; identical to SEQ ID NO: 1183

SEQ ID NO: 211291 - DNA, 579 bp, Canis familiaris; identical to SEQ ID NO: 1184
  misc_feature (437)..(437): n is a, c, g, or t
  misc_feature (459)..(459): n is a, c, g, or t
  misc_feature (467)..(467): n is a, c, g, or t
  misc_feature (499)..(499): n is a, c, g, or t
  misc_feature (520)..(520): n is a, c, g, or t
  misc_feature (527)..(527): n is a, c, g, or t
  misc_feature (567)..(567): n is a, c, g, or t
  misc_feature (576)..(576): n is a, c, g, or t

SEQ ID NO: 211292 - DNA, 640 bp, Canis familiaris; identical to SEQ ID NO: 1185

SEQ ID NO: 211293 - DNA, 677 bp, Canis familiaris; identical to SEQ ID NO: 1186
  misc_feature (674)..(674): n is a, c, g, or t

SEQ ID NO: 211294 - DNA, 664 bp, Canis familiaris; identical to SEQ ID NO: 1187

SEQ ID NO: 211295 - DNA, 707 bp, Canis familiaris; identical to SEQ ID NO: 1188

SEQ ID NO: 211296 - DNA, 714 bp, Canis familiaris; identical to SEQ ID NO: 1189

SEQ ID NO: 211297 - DNA, 725 bp, Canis familiaris; identical to SEQ ID NO: 1190

SEQ ID NO: 211298 - DNA, 600 bp, Canis familiaris
  misc_feature (463)..(463): n is a, c, g, or t
  misc_feature (489)..(489): n is a, c, g, or t
  misc_feature (494)..(494): n is a, c, g, or t
  misc_feature (504)..(504): n is a, c, g, or t
  misc_feature (528)..(528): n is a, c, g, or t
  misc_feature (535)..(535): n is a, c, g, or t
  misc_feature (543)..(543): n is a, c, g, or t
  misc_feature (588)..(588): n is a, c, g, or t
ccggtagccgcttgcagcatggctgaccaactgactgaggagcagattgcagaattcaaagaagccttttcactatttgacaaggatggcgatggaactataacaacaaaggaattgggaactgtaatgaggtctcttgggcagaatcccacagaagcggagttacaggacatgattaatgaagtagatgctgatggaaatggcacaattgacttcccggaatttctgacaatgatggcaagaaaaatgaaagacacagacagtgaagaagaaattagagaagcattccgtgtgtttgataaggatggcaatggctatattagtgcagcagagcttcgccatgtgatgacaaacctgggagagaagttaacagatgaaraggttgatgaaatgatcagggaarcagatattgattggtgatgggcaagtaaactatkaaaaagttttgtccaaatggatgacnggcaaagtggaaaaccattggacaanaatgngttaaaattnttgtaccaaaatgggttaatttgnctttttntttgttgnaacctaatttggaaaaggtttccccctgcttgccaaaaaaatgcntgtttaggaaat

SEQ ID NO: 211299 - DNA, 700 bp, Canis familiaris; identical to SEQ ID NO: 1192

SEQ ID NO: 211300 - DNA, 600 bp, Canis familiaris
  misc_feature (355)..(355): n is a, c, g, or t
  misc_feature (368)..(368): n is a, c, g, or t
  misc_feature (401)..(401): n is a, c, g, or t
  misc_feature (452)..(452): n is a, c, g, or t
  misc_feature (457)..(457): n is a, c, g, or t
  misc_feature (495)..(495): n is a, c, g, or t
  misc_feature (503)..(503): n is a, c, g, or t
  misc_feature (511)..(511): n is a, c, g, or t
  misc_feature (524)..(524): n is a, c, g, or t
  misc_feature (549)..(549): n is a, c, g, or t
  misc_feature (567)..(567): n is a, c, g, or t
  misc_feature (577)..(577): n is a, c, g, or t
cctcagcaagcgccatggatcacgccaggcatggcttcctcccgaggcacagagacacgggcatccttgactccctcgggcgcttctttggcggtgacaggggtgtgcccaagcggggctcaggcaaggatggacatcacgcagcgagaactgcccactatggctccctgccccagaagtcccagcatggccggccccaagacgaaaaccccgtagtgcatttcttcaagaacattgtgacaccacgcacaccttcttcatcgcaaggaaaggggcgaggactgtccctcacaratttagctggggagccsagggccaraarccsggatttggctacggaggccgcgcttcactnacaaggggttaanggcaccgaccccaaggcacgctttcaaaatttnaaactgggaggaagagatagtcgttccgggcacccatggctagacctgaanccccnctcgtgggccgaaaaacctgtcttaagtttttaatatnaccgcttngacgttanaccgcccgtcctnccaccctaggagaacctcttctaancccgtcaatttgcccaanaggtaggccnccagcccccggggtttcggccag

SEQ ID NO: 211301 - DNA, 913 bp, Canis familiaris; identical to SEQ ID NO: 1194
  misc_feature (723)..(723): n is a, c, g, or t
  misc_feature (733)..(733): n is a, c, g, or t
  misc_feature (772)..(772): n is a, c, g, or t
  misc_feature (794)..(794): n is a, c, g, or t
  misc_feature (814)..(814): n is a, c, g, or t
  misc_feature (823)..(823): n is a, c, g, or t
  misc_feature (897)..(897): n is a, c, g, or t

SEQ ID NO: 211302 - DNA, 540 bp, Canis familiaris; identical to SEQ ID NO: 1195
  misc_feature (453)..(453): n is a, c, g, or t
  misc_feature (474)..(474): n is a, c, g, or t
  misc_feature (504)..(504): n is a, c, g, or t
  misc_feature (526)..(526): n is a, c, g, or t

SEQ ID NO: 211303 - DNA, 683 bp, Canis familiaris; identical to SEQ ID NO: 1196

SEQ ID NO: 211304 - DNA, 643 bp, Canis familiaris; identical to SEQ ID NO: 1197

SEQ ID NO: 211305 - DNA, 730 bp, Canis familiaris; identical to SEQ ID NO: 1198

SEQ ID NO: 211306 - DNA, 696 bp, Canis familiaris; identical to SEQ ID NO: 1199

SEQ ID NO: 211307 - DNA, 863 bp, Canis familiaris; identical to SEQ ID NO: 1200

SEQ ID NO: 211308 - DNA, 684 bp, Canis familiaris; identical to SEQ ID NO: 1201
  misc_feature (386)..(386): n is a, c, g, or t

SEQ ID NO: 211309 - DNA, 654 bp, Canis familiaris; identical to SEQ ID NO: 1202

SEQ ID NO: 211310 - DNA, 600 bp, Canis familiaris
  misc_feature (406)..(406): n is a, c, g, or t
  misc_feature (408)..(408): n is a, c, g, or t
  misc_feature (498)..(498): n is a, c, g, or t
  misc_feature (567)..(567): n is a, c, g, or t
  misc_feature (583)..(584): n is a, c, g, or t
tgcactcttttgctgtaccaaatagggctccccacaaagtgctcttccgggaggggttcccgccagaagcactggtatgaatggaagaagcagctagccacagttcacacagatgaaattgcacttcttagtgaaaaagaaactttataaaaagtttgggttttttttttttcctaattataaaaatatccccagaaagagcctgagcaatgttcagacagaagcctcgaaattactttaaattgtttactttgtaatgtttacatgcatacacttttcactttttaaaaaaagaaaaaaaatgcaaactctgactttttaacaacttttcagatttttcatgggacggtggaactctgactcaccaactggatttacatcttaatttaraaatgtatttatttgngnggtttccctccctacccatgtggktttcccctaagatcctggcaaagggatgsccccttctgccaramccttgtttkgttttcccsgggnggctcttgctttttgctttgcagactgccttgcagccatgattttgtcactgacatttgtgagccaaanactgagcctttttggnngaatataaacaaactc

SEQ ID NO: 211311 - DNA, 600 bp, Canis familiaris
  misc_feature (418)..(418): n is a, c, g, or t
  misc_feature (444)..(444): n is a, c, g, or t
  misc_feature (456)..(456): n is a, c, g, or t
  misc_feature (546)..(546): n is a, c, g, or t
  misc_feature (567)..(567): n is a, c, g, or t
  misc_feature (589)..(589): n is a, c, g, or t
  misc_feature (595)..(595): n is a, c, g, or t
ggctcgscmcgrkccgcatcgcacgccgagccgscgccatggccgcgtacaagctggtgctgatccggcacggcgagagcgcttggaacctggakawyykyttcagcggctggtacgacgccgacctgagcccggcggkgcacgaggaggcgaagcgcggcgggcaggcgctgcgagatgctggctatgagtttgatatctgcttcacctcagtgcagaagagagcaattcggactctctggacagtgctggatgccattgaccaaatgtggctgccagtagtgaggacttggcgcctcaatgagcggcactatgggggtctgactggcctcaataaagcagaaactgctgccaagcatggtgaggcccargtaaagatctggaggcgttcctatgatgttccaccaccttcaatggnacctgacatccttttacagcaacatnagtaaggatcgncggtttcaaacctacttgaaaataacttccttctttgagagtttaaggataccattgcagaactttggccttttgaatgaaaaaaaattncccaaatcaaggaaggaaacnagtcttgttgaacccttggaanaacttngggat

SEQ ID NO: 211312 - DNA, 657 bp, Canis familiaris; identical to SEQ ID NO: 1205

SEQ ID NO: 211313 - DNA, 993 bp, Canis familiaris; identical to SEQ ID NO: 1206
  misc_feature (42)..(42): n is a, c, g, or t

SEQ ID NO: 211314 - DNA, 600 bp, Canis familiaris
  misc_feature (356)..(356): n is a, c, g, or t
  misc_feature (431)..(431): n is a, c, g, or t
  misc_feature (433)..(433): n is a, c, g, or t
  misc_feature (448)..(448): n is a, c, g, or t
  misc_feature (501)..(501): n is a, c, g, or t
  misc_feature (523)..(523): n is a, c, g, or t
  misc_feature (564)..(564): n is a, c, g, or t
  misc_feature (572)..(572): n is a, c, g, or t
  misc_feature (593)..(593): n is a, c, g, or t
ctattgtccctcaacaacaacaaaatgggaaagccgattaaaacacccataagccaaatatggggccagccatcggcaacacttgccaagcaacaacggggtagaaatttctgtgttccccacactcgacagtagtgttcacacgtgacctttttacatcaccttatgtacacaacaggagctacttccttcatttcctttaactgttgtctaacaatagtgttgactgtatgggtaagagccagcaagtgcccttaggatgccgcatggaaaaaagcagttgtaataattccaaagtgggaatctatttattatgtagcaccgtggctaagaaggaagagcctgagggacatatncatgtggtcgcaccacttttgcacacccctgtcctcactggcctcatgaagcccggcacgatgggaatcagagtncnggatctgggcggctntgggtaagtgggctgattagcagcccaagtcatttttaacatgctcctttttnttactttttgctaggacctggntggcaaattacttaactggtttttaaaaaaaaaaatttagnaaaagagngggggaagggacaaaaggaanttttcct

SEQ ID NO: 211315 - DNA, 687 bp, Canis familiaris; identical to SEQ ID NO: 1208

SEQ ID NO: 211316 - DNA, 716 bp, Canis familiaris; identical to SEQ ID NO: 1209
  misc_feature (53)..(53): n is a, c, g, or t

SEQ ID NO: 211317 - DNA, 853 bp, Canis familiaris; identical to SEQ ID NO: 1210

SEQ ID NO: 211318 - DNA, 674 bp, Canis familiaris; identical to SEQ ID NO: 1211

SEQ ID NO: 211319 - DNA, 666 bp, Canis familiaris; identical to SEQ ID NO: 1212

SEQ ID NO: 211320 - DNA, 600 bp, Canis familiaris
  misc_feature (496)..(496): n is a, c, g, or t
  misc_feature (562)..(562): n is a, c, g, or t
  misc_feature (566)..(566): n is a, c, g, or t
  misc_feature (594)..(594): n is a, c, g, or t
  misc_feature (596)..(596): n is a, c, g, or t
ggaaataaaaatatcagttttattttgcaattgcccaacttcttttgttatgtagtctgattagagacaacaaatagcagctatttttcaccttcagtttcatttttttccaaattgtcaatctctgctagtaattatgaatcttaaacaattttatcaaaaacctagagaccaaagacatgcctattaaaatagtctccttcctgtcactgggaactatgcatcgaacatcctgggtcattctaagcctcaggagagattgtaaagatcctttcaaagtgctggtatgaaatcaatgggaaaaagaaaagccaactttaatagcaacaagaaattatgtaccatatatacatcatagcaaatactttatatttgagaatctttacagcttacatttccattccattattatgagatgaaaaacaaaaaattgcaggtagcatgcaaattataaatacagccttccactttactaaacaaattcttactttccagnggtacttcccaatttatgcaggaactggctgcaagctgaactgatagaaattctttaaggttaaanatcnttctcatttaggagaaaccaatacccancntcac

SEQ ID NO: 211321 - DNA, 642 bp, Canis familiaris; identical to SEQ ID NO: 1214

SEQ ID NO: 211322 - DNA, 739 bp, Canis familiaris; identical to SEQ ID NO: 1215
  misc_feature (2)..(2): n is a, c, g, or t

SEQ ID NO: 211323 - DNA, 1400 bp, Canis familiaris
cgagggccgctcctactccacgtgcaccaccgacggccgctcggacggctaccgctggtgctccaccaccgscgactacgaccaggacaaactctacggcttctgsccaacccgagtcgattccgcggtgaccgggggcaactccgccggggagccgtgtgtcttccccttcatcttyctgggcaagyagtactcgacgtgcaccagggagggccgcggagatgggcacctctggtgcgccaccacttcgaactttgacagagacaagaagtggggcttctgcccggaccaaggatacagcctgttccttgtggccgcccatgagttcggccacgcgctgggtttagatcattcatcggtgccagaagcgctcatgtaccccatgtacagcttcaccgagggcccccccctgcatgaagacgacgtgaggggcatccagcatctgtacggtcctcgccctgaacctgagccacagcctccaaccgccccgcccaccgccccgcccaccgtctgcgctactggtcctcccaccacccgcccctcagagcgccccactgctggccccacaggcccccctgcagctggccccacgggtccccccactgctggcccctctgaggcccctacagtgcctgtggatccggcagaggatatatgcaaagtgaacatcttcgacgccatcgcggagatcaggaactacttgcatttcttcaaggaagggaartactggcgattctccaagggcaagggacgccgggtgcagggccccttccttatcaccgacacgtggcctgcgctgccccgcaagctggactccgcctttgaggacgggctcaccaagaagactttcttcttctctgggcgccaagtgtgggtgtacacaggcacgtcggtggtaggcccgaggcgtctggacaagctgggcctgggcccggaggttacccaagtcaccggcgccctcccgcaaggcgggggtaaggtgctgctgttcagcaggcagcgcttctggagtttcgacgtgaagacgcagaccgtggatcccaggagcgccggctcggtggaacagatgtaccccggggtgcccttgaacacgcatgacatcttccagtaccaagagaaagcctacttctgccaggaccgcttctactggcgtgtgaattctcggaatgaggtgaaccaggtggacgaagtgggctacgtgacctttgacattttgcagtgccctgaggattagrttcagcactgcagagtggatcctatagggatggtcccaatggggagggagccatttgccggacacaaactggtgggtttgttctggaggacaaggagagttgaggtgggctgggctgggcccctctttccaccttccttttttgctggatgtttttaataaactt

SEQ ID NO: 211324 - DNA, 752 bp, Canis familiaris; identical to SEQ ID NO: 1217
  misc_feature (2)..(2): n is a, c, g, or t
  misc_feature (672)..(672): n is a, c, g, or t
  misc_feature (683)..(683): n is a, c, g, or t
  misc_feature (724)..(724): n is a, c, g, or t
  misc_feature (733)..(733): n is a, c, g, or t
  misc_feature (735)..(735): n is a, c, g, or t

SEQ ID NO: 211325 - DNA, 632 bp, Canis familiaris; identical to SEQ ID NO: 1218
  misc_feature (29)..(29): n is a, c, g, or t

SEQ ID NO: 211326 - DNA, 637 bp, Canis familiaris; identical to SEQ ID NO: 1219

SEQ ID NO: 211327 - DNA, 186 bp, Canis familiaris; identical to SEQ ID NO: 1220

SEQ ID NO: 211328 - DNA, 772 bp, Canis familiaris; identical to SEQ ID NO: 1221

SEQ ID NO: 211329 - DNA, 701 bp, Canis familiaris; identical to SEQ ID NO: 1222

SEQ ID NO: 211330 - DNA, 1250 bp, Canis familiaris; identical to SEQ ID NO: 1223

SEQ ID NO: 211331 - DNA, 1250 bp, Canis familiaris; identical to SEQ ID NO: 1224

SEQ ID NO: 211332 - DNA, 600 bp, Canis familiaris
  misc_feature (349)..(349): n is a, c, g, or t
  misc_feature (364)..(364): n is a, c, g, or t
  misc_feature (378)..(378): n is a, c, g, or t
  misc_feature (391)..(391): n is a, c, g, or t
  misc_feature (421)..(421): n is a, c, g, or t
  misc_feature (468)..(469): n is a, c, g, or t
  misc_feature (497)..(497): n is a, c, g, or t
  misc_feature (520)..(520): n is a, c, g, or t
  misc_feature (528)..(529): n is a, c, g, or t
  misc_feature (539)..(539): n is a, c, g, or t
gcaagagggcgtgctcaacacccaggtcacccaggaactgacggcgctgatggatgagaccatgaaggaggtgaaggcctacaaggcggagctggacgagcagctgggccccatgacctcggagacgcaggcccgcgtggccaaggagctgcaggcggcgcaggcccsgctgcgctcggacatggaggacgtgcgcaaccgcctgacgcagtaccgcggcgagctgcaggccatgctgggccakagcagcgaggagctgcgggcgcgcttcgcctyccacatgcgcaagctgcgcaagcgggtgctgcgggacgccgaggacctgcagaggcgcctggccgtctacaangccggcgtgcgcganggtgccgagcgcancgtgagcagcatncgcgagcgcctctggccgctgctggagcangcccgcgagcgcaacgcccaaggtgggcgccctggccacgcagccgnntgctcgagcgggccgacgccctgggcancagctgcgcggcagctggagganatgaacannccgggcccgnggcacctggagaaatgcccagcaaatacagaagggccggtgaaaatggagaacagcccacc

SEQ ID NO: 211333 - DNA, 586 bp, Canis familiaris; identical to SEQ ID NO: 1226
  misc_feature (26)..(26): n is a, c, g, or t
  misc_feature (38)..(39): n is a, c, g, or t
  misc_feature (71)..(71): n is a, c, g, or t
  misc_feature (87)..(87): n is a, c, g, or t
  misc_feature (131)..(131): n is a, c, g, or t
  misc_feature (136)..(136): n is a, c, g, or t
  misc_feature (158)..(158): n is a, c, g, or t

SEQ ID NO: 211334 - DNA, 614 bp, Canis familiaris; identical to SEQ ID NO: 1227

SEQ ID NO: 211335 - DNA, 600 bp, Canis familiaris
  misc_feature (272)..(273): n is a, c, g, or t
  misc_feature (301)..(301): n is a, c, g, or t
  misc_feature (308)..(308): n is a, c, g, or t
  misc_feature (350)..(350): n is a, c, g, or t
  misc_feature (352)..(352): n is a, c, g, or t
  misc_feature (388)..(389): n is a, c, g, or t
  misc_feature (407)..(407): n is a, c, g, or t
  misc_feature (421)..(421): n is a, c, g, or t
  misc_feature (427)..(427): n is a, c, g, or t
  misc_feature (464)..(464): n is a, c, g, or t
  misc_feature (494)..(494): n is a, c, g, or t
  misc_feature (534)..(534): n is a, c, g, or t
  misc_feature (580)..(580): n is a, c, g, or t
  misc_feature (586)..(586): n is a, c, g, or t
tagggttagggttgggggaaaaaagtgcaggtatttagtaagaaaagtgacccatctagaaagcattgtgaggttgtgtgttggttgactgtgacggaaatgaagggcggggttaagttgtaaatggtggctgattgctctctaactatgtacatgtttgttgggatggctgtcccatattttgtatattggaataaaaatttctataaattatcgtaactgaaagtaaatattctaaattaagtctcactgctaawgtcgtatgggttctnnctttggaaacctttacctttaaaaaatngtttaanacaggggccatgaaactttaggagaaaggggagaaaggaaangngtaatatatgggtcttggttgcctcttaaccatcannatcgggtttttttttttntgtgatggcagtanaaaggnctccttttataacatactactcttgatcttttttaangatactttcattaaaaattcttcatgaggnatttaactgggagctgggagggtaaggcgtccggcctggntttcatgaattaactggggaccttgggcaagtacttaacctttggnttaagntcctttttggaaag

SEQ ID NO: 211336 - DNA, 600 bp, Canis familiaris
  misc_feature (316)..(316): n is a, c, g, or t
  misc_feature (325)..(325): n is a, c, g, or t
  misc_feature (351)..(351): n is a, c, g, or t
  misc_feature (367)..(367): n is a, c, g, or t
  misc_feature (503)..(503): n is a, c, g, or t
  misc_feature (529)..(529): n is a, c, g, or t
  misc_feature (542)..(542): n is a, c, g, or t
  misc_feature (566)..(566): n is a, c, g, or t
  misc_feature (576)..(576): n is a, c, g, or t
  misc_feature (599)..(599): n is a, c, g, or t
caccagcgctaaagattatagtgaattccctgaaggatctagtaactgcatttgtgccaagtggaaaaattatgcagatagtggatcaaaagttgcctggtctccttggcaattttccaggtccttttgaggaggaaatgaaggggattgcagcggttactggtatacctttaggagagattcttacattcaatgttttctacgaatttttcaccatttgtacctcaataataacagaagacaaagaaggtcatctactacatgggcgaaacatggattttggaatatttcttgggtggaacataaacaataatanctgggtcgnaacttgacaacttcaaaccttttttnagtgaacctggctttncaaagaaaataataaaacccgcttcaaggcttcaagctttgctgctatgtgggcatgttaacaggattaaaccgggctgttcagtcttacgttaaatgaacgtttcaacataaatggcggtacctgggtgtcatanaatggattttgggaaaaaaaaaagcntgtggacgggttntactaaaataattttggaaatggncaggtacaanaaccaaaatccttgtcaaaacana

SEQ ID NO: 211337 - DNA, 600 bp, Canis familiaris
  misc_feature (434)..(434): n is a, c, g, or t
  misc_feature (471)..(471): n is a, c, g, or t
  misc_feature (535)..(535): n is a, c, g, or t
  misc_feature (555)..(555): n is a, c, g, or t
  misc_feature (565)..(565): n is a, c, g, or t
  misc_feature (579)..(579): n is a, c, g, or t
  misc_feature (581)..(581): n is a, c, g, or t
  misc_feature (592)..(592): n is a, c, g, or t
ctttggcaggagctggggccagcagtgttagcaggggtggcagtccttgtatttgttataccagtgaatgctttagttgcaactagagtgaaaaaactaaagatcctcaaactttatgcatgggagccttcctataaaaagaagattattgaaattcgtgaacaggaattggaagttcaaaaatcagctggatatcttgctgtgttttctatgctgacattaacttgcattccattcttggkttctctgggcgacatttggcatctatttcttattagatgaargraacattttaacagccactaaagtgktcacatycatgtctttgkttaatatttttgaggcttcctttgtttgatttaccagtggtgatctcagctgtggtccagacaagaatatcattggatcgtctggaagactttctcaacgctgangagcttcttcctcaaaatattgaaacaaactacgtangagatcatgccatttggatttacaaatgctttccttctcctgggataaaaaagggattccagtnccttaaaaaacttggacatnaagattccanaaggagcttttacngncctgtttgtanggcaagtt

SEQ ID NO: 211338 - DNA, 600 bp, Canis familiaris
  misc_feature (554)..(554): n is a, c, g, or t
  misc_feature (589)..(589): n is a, c, g, or t
ttggttatgttggatgaacaaggagaacaactggaacgcattgaggaagggatggaccaaatcaataaggacatgaaagaagcagaaaagaatttgacggacctaggaaaattctgcgggctttgtgtgtgtccctgtaacaagcttaaatcaagtgatgcttacaaaaaagcctggggcaataatcaggatggagtggtggcyagccagcctgctcgtgtggtggacgaacgggagcagatggccatcagtggtggcttcattcggagggtaacaaatgatgcccgagaaaatgaaatggatgaaaacctggagcaggtgagcggtatcattggaaaccttcgtcacatgggccctggatatgggcaatgagattgatacacagaaccgccagatcgacaggatcatgggagaaggctgattycmacaaaaccagaattgatgaggccmaccaacgkgcaacaaagatgctgggggagtggttaaatgtgcccacctgtgttctcttccaaatgctgttgggcaagatagcaccttcatgcttttctcatcgnattacctagtaggtctgcacacatacacatattanttcccccccat

SEQ ID NO: 211339 - DNA, 796 bp, Canis familiaris; identical to SEQ ID NO: 1232

SEQ ID NO: 211340 - DNA, 718 bp, Canis familiaris; identical to SEQ ID NO: 1233
  misc_feature (9)..(9): n is a, c, g, or t

SEQ ID NO: 211341 - DNA, 600 bp, Canis familiaris
  misc_feature (346)..(346): n is a, c, g, or t
  misc_feature (367)..(367): n is a, c, g, or t
  misc_feature (383)..(383): n is a, c, g, or t
  misc_feature (419)..(419): n is a, c, g, or t
  misc_feature (435)..(435): n is a, c, g, or t
  misc_feature (509)..(509): n is a, c, g, or t
  misc_feature (519)..(519): n is a, c, g, or t
  misc_feature (552)..(552): n is a, c, g, or t
  misc_feature (597)..(597): n is a, c, g, or t
gaagctcgggctggttaaatgacttgctgagcgtcccatggcctagctgccttatgtggcgctcacactgtctcctgcatgacgggcggctcctccagctttacttctctctccagtgctgactgctgtgtttagcaatcccctaggattcttgtcagagctccacctctctgtgactggccattcctttcggtgctgctgtcctttttggggggttccttatctctgtatacatgtagctttgccagatatgtacttagtaatataaactgtgttaataaaaaccatttactgtgtgatcatgagaattaaaaataagarccgatwagttgtymcttttgataanaggaagttaagaagtctcccncaggtgttaatgcagnggcatgaccgttgacactagctaggctgtaacaagnagggcatgtgctgctnccggcgtgctccgaggcctgccgaggccacccggccccggctcccctaggatctcgctcaagaacatttgctgngtagctctgngaaatttggaatttgctttttccctaacttaangtcagggattgggattgggctttaactctaaaaactactccatgnaaa

SEQ ID NO: 211342 - DNA, 678 bp, Canis familiaris; identical to SEQ ID NO: 1235

SEQ ID NO: 211343 - DNA, 551 bp, Canis familiaris; identical to SEQ ID NO: 1236
  misc_feature (537)..(537): n is a, c, g, or t

SEQ ID NO: 211344 - DNA, 424 bp, Canis familiaris; identical to SEQ ID NO: 1237

SEQ ID NO: 211345 - DNA, 643 bp, Canis familiaris; identical to SEQ ID NO: 1238

SEQ ID NO: 211346 - DNA, 781 bp, Canis familiaris; identical to SEQ ID NO: 1239

SEQ ID NO: 211347 - DNA, 806 bp, Canis familiaris; identical to SEQ ID NO: 1240

SEQ ID NO: 211348 - DNA, 600 bp, Canis familiaris
  misc_feature (85)..(85): n is a, c, g, or t
  misc_feature (174)..(174): n is a, c, g, or t
ttaagttgccgtgggagaagggattagaggatcttcccttttctatttaggaagttctattcttgttaaaagtattttaagatgnactatatgttatttcacttttatggcataaaatcaagatatttccttgctaaagtatttaaaacttatcttggtatcttttttatatanttgaaaataagtttatatgtatttgaacttttttttagaattcctggaaaagctattcaaatatttttatgttattctgatattttagcactactttggtagcttttacactgagtttctaagaaaattgaaaaatagtattcttttatagtataaaaaataactggcacctgacacactggaaagtgttataacagaaattcaactttaaaaatccatttattccacttcatcatcttccttgtgtgaattttgtaaagtcttgttttaggaattttatacatctgttatgccactaaaataaggtgcttgatgtccagtgttgattgtattatgctgctcattgatcgttccacatttttaaataatatgtcctgaaggattagatgaaatgttactcttttaagccaagtgcaattgatttcc

SEQ ID NO: 211349 - DNA, 625 bp, Canis familiaris; identical to SEQ ID NO: 1242

SEQ ID NO: 211350 - DNA, 447 bp, Canis familiaris; identical to SEQ ID NO: 1243

SEQ ID NO: 211351 - DNA, 827 bp, Canis familiaris; identical to SEQ ID NO: 1244
  misc_feature (457)..(457): n is a, c, g, or t

SEQ ID NO: 211352 - DNA, 677 bp, Canis familiaris; identical to SEQ ID NO: 1245

SEQ ID NO: 211353 - DNA, 500 bp, Canis familiaris; identical to SEQ ID NO: 1246

SEQ ID NO: 211354 - DNA, 715 bp, Canis familiaris; identical to SEQ ID NO: 1247

SEQ ID NO: 211355 - DNA, 700 bp, Canis familiaris; identical to SEQ ID NO: 1248

SEQ ID NO: 211356 - DNA, 590 bp, Canis familiaris; identical to SEQ ID NO: 1249

SEQ ID NO: 211357 - DNA, 1327 bp, Canis familiaris; identical to SEQ ID NO: 1250

SEQ ID NO: 211358 - DNA, 698 bp, Canis familiaris; identical to SEQ ID NO: 1251

SEQ ID NO: 211359 - DNA, 722 bp, Canis familiaris; identical to SEQ ID NO: 1252

SEQ ID NO: 211360 - DNA, 703 bp, Canis familiaris; identical to SEQ ID NO: 1253

SEQ ID NO: 211361 - DNA, 600 bp, Canis familiaris
  misc_feature (467)..(467): n is a, c, g, or t
  misc_feature (534)..(534): n is a, c, g, or t
  misc_feature (541)..(541): n is a, c, g, or t
  misc_feature (575)..(575): n is a, c, g, or t
  misc_feature (581)..(581): n is a, c, g, or t
agttttgtgccaacgggccaaggtggccatgagccactttgagcctcacgaatacatccgctatgacctgctagagaagaacattgacattgttcgcaaacgattgaatcggcctctgactctctcagagaagattgtatatggacacctggatgacccagccaaacaggatatcgagcggggcaagacgtacctgcggctgcggccggaccgcgtggccatgcaggatgccacggcccagatggccatgctgcagttcatcagcagtgggctgccaaggtgggctgtgccatccaccatccactgtgaccatctgatcgaggcccagctygggggktgagaaaaaacttgcgcccggcccaaggacataaaccaaggaagtgtataattttctggcaactgcaggtgccaagtatggtgtggggcttttggaggcccgcttttggaaatattcaccaaaatcattntgggaaaactatgcataccctggggttctttttgattgggacttgattccacacccccaatggtggngggcttnggggcatttcatttgaatcggaggtgcttatccntggacntatggccgggattcctgga

SEQ ID NO: 211362 - DNA, 911 bp, Canis familiaris; identical to SEQ ID NO: 1255

SEQ ID NO: 211363 - DNA, 600 bp, Canis familiaris
  misc_feature (374)..(374): n is a, c, g, or t
  misc_feature (417)..(417): n is a, c, g, or t
  misc_feature (436)..(436): n is a, c, g, or t
  misc_feature (457)..(457): n is a, c, g, or t
  misc_feature (466)..(466): n is a, c, g, or t
  misc_feature (502)..(502): n is a, c, g, or t
  misc_feature (505)..(505): n is a, c, g, or t
  misc_feature (511)..(511): n is a, c, g, or t
  misc_feature (532)..(532): n is a, c, g, or t
  misc_feature (563)..(563): n is a, c, g, or t
aacatgggcaccaccatgcctccccacccaggagctgcctgcccactcatcactcactttcttcccctctgagagcaggaagtgacatggcaccttgtccaggaccccggaatcctgggtgccagtgtgtgtgccaaagcccaccgccccacccaaagggagggtgtccccagagcaacagagtaggagcctatcccttctttgccacttcctcatcctgtccccattccccactcttggccagaagccccgtatgctgctgggtaccccactgagtccagaggtggcttggtaccacccgctgcactcctgccacctcagctggctcctgcccatcttcccarcgtgaacgggawtggcttaaaatgacaggngggagaataattaatkgacccaagytctacttgtcaccctttncaaaaggggccttgttatnttgccagcactgataagcaancctggctanggtctggggacaatgccaaattgagggtacctgaantgngcaggncagcttggttctggggtaganaaattccccgccttcttttttagcatatggncagcatgtttaccatctggacagctctgggcctgctc

SEQ ID NO: 211364 - DNA, 267 bp, Canis familiaris; identical to SEQ ID NO: 1257

SEQ ID NO: 211365 - DNA, 553 bp, Canis familiaris; identical to SEQ ID NO: 1258

SEQ ID NO: 211366 - DNA, 659 bp, Canis familiaris; identical to SEQ ID NO: 1259

SEQ ID NO: 211367 - DNA, 671 bp, Canis familiaris; identical to SEQ ID NO: 1260

SEQ ID NO: 211368 - DNA, 441 bp, Canis familiaris; identical to SEQ ID NO: 1261
  misc_feature (417)..(417): n is a, c, g, or t
  misc_feature (433)..(433): n is a, c, g, or t

SEQ ID NO: 211369 - DNA, 578 bp, Canis familiaris; identical to SEQ ID NO: 1262

SEQ ID NO: 211370 - DNA, 752 bp, Canis familiaris; identical to SEQ ID NO: 1263
  misc_feature (7)..(7): n is a, c, g, or t

SEQ ID NO: 211371 - DNA, 431 bp, Canis familiaris; identical to SEQ ID NO: 1264
  misc_feature (405)..(405): n is a, c, g, or t

SEQ ID NO: 211372 - DNA, 618 bp, Canis familiaris; identical to SEQ ID NO: 1265

SEQ ID NO: 211373 - DNA, 583 bp, Canis familiaris; identical to SEQ ID NO: 1266

SEQ ID NO: 211374 - DNA, 896 bp, Canis familiaris; identical to SEQ ID NO: 1267
  misc_feature (17)..(17): n is a, c, g, or t

SEQ ID NO: 211375 - DNA, 681 bp, Canis familiaris; identical to SEQ ID NO: 1268

SEQ ID NO: 211376 - DNA, 745 bp, Canis familiaris; identical to SEQ ID NO: 1269

SEQ ID NO: 211377 - DNA, 659 bp, Canis familiaris; identical to SEQ ID NO: 1270

SEQ ID NO: 211378 - DNA, 672 bp, Canis familiaris; identical to SEQ ID NO: 1271

SEQ ID NO: 211379 - DNA, 644 bp, Canis familiaris; identical to SEQ ID NO: 1272

SEQ ID NO: 211380 - DNA, 701 bp, Canis familiaris; identical to SEQ ID NO: 1273

SEQ ID NO: 211381 - DNA, 714 bp, Canis familiaris; identical to SEQ ID NO: 1274

SEQ ID NO: 211382 - DNA, 665 bp, Canis familiaris; identical to SEQ ID NO: 1275
  misc_feature (70)..(70): n is a, c, g, or t

SEQ ID NO: 211383 - DNA, 652 bp, Canis familiaris; identical to SEQ ID NO: 1276

SEQ ID NO: 211384 - DNA, 627 bp, Canis familiaris; identical to SEQ ID NO: 1277

SEQ ID NO: 211385 - DNA, 639 bp, Canis familiaris; identical to SEQ ID NO: 1278
  misc_feature (622)..(622): n is a, c, g, or t
  misc_feature (629)..(629): n is a, c, g, or t

SEQ ID NO: 211386 - DNA, 904 bp, Canis familiaris; identical to SEQ ID NO: 1279

SEQ ID NO: 211387 - DNA, 1400 bp, Canis familiaris
agatcgactccctgttcgagggcatcgacttctacacgtccatcaccagggcgcggttcgaggagctgtgctccgacctgttccggagcaccctggagcccgtggagaaggccctgcgcgacgccaagctggacaaggcccagatccacgacctggtcctggtggggggctccacccgtatccccaaggtgcagaagctgctgcaggacttcttcaacggccgcgatctcaacaagagcatcaatcccgacgaggcggtggcctatggggcggccgtgcaggcagccatcctgatgggagacaagtccgagaacgtgcaggacctgctgctgctggacgtggcgcccctgtcgctggggctggagacggccgggggcgtgatgaccgccctgtcgcgcaactccaccatccccaccaagcagacgcagatcttcaccacctactcggacaaccagcctggagtgctgatccaggtgtacgagggtgagagggccatgacgcgcgacaacaacctactggggcgcttcgagctaagcggcatccccccggcgccgcggggcgtgccccagatcgaggtgaccttcgacatcgacgccaacggcatcctgaacgtcacggccacggacaagagcacgggcaaggccaacaagatcaccatcaccaacgacaagggccgcctgagcaaggaggagatcgagcgcatggtgcaggaggccgagaagtacaaagccgaggacgaggtgcagcgcgacagggtgtctgccaagaacgccctggagtcctacgccytcwacatgwagagtscggtggaggacgagggtctcaaggggaagatcagcgaggccgacaagaagaaggtgctggacaagtgccaggaggtgatttcctggctggacgscwhcaccytggcggaraaggacgagtttgagcacmagaggaaggagctggascaggtgtgtaaccccatcatcaccggactgtaccmgggagcgggtggtcctggggctggtggctttggggctcaggctcccmaagggggctctgggtctggccccaccmtcgaggaggtggattaggacttcttccccagattgttcctgtttgtgtcagaaacggttaggattaaggattctracmttgccytatatgtctgtgtttcatcmgtctcmactctgcmagttgtttgcmaagtttcmactgtcttttggtgaagttatgaagttccytttttttttagagtccmaatgtaggaagaatttatactgccmttttttttttcttttttgtagtattgacgttgaacctgggcctttgttataactgatttttgcmgagtaaataaactcmatcmtttgtcttgccaaaaaaaaaaaaaaaaaaaaaaaaaaaaaaaaaaaaaa

SEQ ID NO: 211388 - DNA, 805 bp, Canis familiaris; identical to SEQ ID NO: 1281

SEQ ID NO: 211389 - DNA, 561 bp, Canis familiaris; identical to SEQ ID NO: 1282

SEQ ID NO: 211390 - DNA, 436 bp, Canis familiaris; identical to SEQ ID NO: 1283

SEQ ID NO: 211391 - DNA, 607 bp, Canis familiaris; identical to SEQ ID NO: 1284

SEQ ID NO: 211392 - DNA, 687 bp, Canis familiaris; identical to SEQ ID NO: 1285

SEQ ID NO: 211393 - DNA, 562 bp, Canis familiaris; identical to SEQ ID NO: 1286

SEQ ID NO: 211394 - DNA, 556 bp, Canis familiaris; identical to SEQ ID NO: 1287
  misc_feature (425)..(425): n is a, c, g, or t
  misc_feature (479)..(479): n is a, c, g, or t
  misc_feature (499)..(499): n is a, c, g, or t
  misc_feature (502)..(502): n is a, c, g, or t
  misc_feature (511)..(511): n is a, c, g, or t
  misc_feature (535)..(535): n is a, c, g, or t
  misc_feature (537)..(537): n is a, c, g, or t

SEQ ID NO: 211395 - DNA, 626 bp, Canis familiaris; identical to SEQ ID NO: 1288

SEQ ID NO: 211396 - DNA, 375 bp, Canis familiaris; identical to SEQ ID NO: 1289

SEQ ID NO: 211397 - DNA, 684 bp, Canis familiaris; identical to SEQ ID NO: 1290

SEQ ID NO: 211398 - DNA, 640 bp, Canis familiaris; identical to SEQ ID NO: 1291

SEQ ID NO: 211399 - DNA, 668 bp, Canis familiaris; identical to SEQ ID NO: 1292

SEQ ID NO: 211400 - DNA, 647 bp, Canis familiaris; identical to SEQ ID NO: 1293

SEQ ID NO: 211401 - DNA, 502 bp, Canis familiaris; identical to SEQ ID NO: 1294

SEQ ID NO: 211402 - DNA, 600 bp, Canis familiaris
gagggtgtgacctgcatcatcttcatcgcggcgctgagcgcctacgacatggtgctggtggaggacgacgaagtgaaccgcatgcacgagagcctgcacctgttcaacagcatctgcaaccaccgctacttcgccaccacgtccattgtgctcttcctcaataagaaggacgttttctccgagaagataaaaaaggcgcatctcagcatctgcttccccgattacgacgggcccaacacgtacgaggacgcgggcaactacatcaaggtgcagttcctcgagctcaacatgcgacgtgacgtgaaggagatctattcccatatgacttgtgctacagacacacagaacgtcaaatttgtcttcgatgccgtcaccgatatcatcatcaaggagaacctcaaagattgcggcctcttctgaggtgcctgaactcaggcttgttcctgacaccctatagtcctagcctcctagtagccctagcccacaggagcctatcagcacccccaacacacccccagaatcctgggccccagcctgtggtcccacctgccacagacccaaaaccctgagccccactagccttgaggccccctcgtgccg

SEQ ID NO: 211403 - DNA, 685 bp, Canis familiaris; identical to SEQ ID NO: 1296

SEQ ID NO: 211404 - DNA, 600 bp, Canis familiaris
  misc_feature (438)..(438): n is a, c, g, or t
  misc_feature (450)..(450): n is a, c, g, or t
  misc_feature (452)..(452): n is a, c, g, or t
  misc_feature (468)..(468): n is a, c, g, or t
  misc_feature (503)..(503): n is a, c, g, or t
  misc_feature (527)..(527): n is a, c, g, or t
  misc_feature (536)..(537): n is a, c, g, or t
  misc_feature (552)..(552): n is a, c, g, or t
  misc_feature (582)..(582): n is a, c, g, or t
  misc_feature (599)..(599): n is a, c, g, or t
agggcagctttcaccatgcatcagtccctgactcagcagcggtccagcgacatgtccctgcccgattccatgggagccttcaatcgaaggaaacgaaactccatctatgtcaccgtgactttgcttatcgtgtccgtgttaattctcacggtgggccttgccgcaaccactaggacccagaatgtgactgtcggaggttattacccaggagttattctcggctttggatcattccttggaatcatcggatcaaacctcgttgaaaacaaacggcagatgctggtggcctctatcgtctttatcaagcttggtgtgattgcagccttttgttgtgccatagtcgacggggtctttkstkgcagacacatttgatctgraacctytttwtgtaaccggtgccactacgtcccaagacatccaaaaaggaacttgagaggncataagttcctnancaaaaattttcttcgnggggtatgaggaaccttaccaagcagctaagaggngaatgcctaacttagcctggattntgacgcctnnatccgggcaacactntttggtggactttaaactggggaaccgggngggaaacgggggtctant

SEQ ID NO: 211405 - DNA, 710 bp, Canis familiaris; identical to SEQ ID NO: 1298

SEQ ID NO: 211406 - DNA, 666 bp, Canis familiaris; identical to SEQ ID NO: 1299

SEQ ID NO: 211407 - DNA, 483 bp, Canis familiaris; identical to SEQ ID NO: 1300

SEQ ID NO: 211408 - DNA, 966 bp, Canis familiaris; identical to SEQ ID NO: 1301
  misc_feature (693)..(693): n is a, c, g, or t
  misc_feature (725)..(725): n is a, c, g, or t
  misc_feature (731)..(731): n is a, c, g, or t
  misc_feature (747)..(747): n is a, c, g, or t
  misc_feature (757)..(757): n is a, c, g, or t
  misc_feature (783)..(783): n is a, c, g, or t
  misc_feature (802)..(802): n is a, c, g, or t
  misc_feature (829)..(829): n is a, c, g, or t
  misc_feature (849)..(849): n is a, c, g, or t
  misc_feature (882)..(882): n is a, c, g, or t
  misc_feature (890)..(890): n is a, c, g, or t
  misc_feature (919)..(919): n is a, c, g, or t
  misc_feature (924)..(924): n is a, c, g, or t
  misc_feature (946)..(946): n is a, c, g, or t

SEQ ID NO: 211409 - DNA, 600 bp, Canis familiaris
  misc_feature (381)..(381): n is a, c, g, or t
  misc_feature (493)..(493): n is a, c, g, or t
  misc_feature (527)..(527): n is a, c, g, or t
  misc_feature (545)..(545): n is a, c, g, or t
  misc_feature (596)..(596): n is a, c, g, or t
attctcactgcacatttttttaatagaagtgtcccagcttacctgtgagtctgcttctgcatatactcggaccgatatcttctgtaccagaaggcccggacaaaagctcgggaaagcttgtacttcttcacgaggtcattgattgcttcctgtaggcctggaggtgtaactacttgtctttcagcatcagtggtgctgataacttgcctgtctgcaacctatgcacaaacatttcatatttgtcactatatcacaattcccaccaaaagattgtagctatttcattttagtaacagtcctcattgtacagccaagtgcaacactgtcagatagtaacctactagaacaaatacagaatgcaactgcattaaaaatttatanggtgccctggagtggcttaatgggttgagctttccaacttttggtttcaagctcaaggtctaatctcaagggtcctgacataaaagctccacattgggcttttgtgcacagngggggaggcaccttgagggtctcctttgcctctncccctggctcaggaactncatgttcattaatcttttttaaaaaaaaattatgaattttgtttgcaaaancagg

SEQ ID NO: 211410 - DNA, 660 bp, Canis familiaris; identical to SEQ ID NO: 1303

SEQ ID NO: 211411 - DNA, 661 bp, Canis familiaris; identical to SEQ ID NO: 1304

SEQ ID NO: 211412 - DNA, 1400 bp, Canis familiaris
tgccatcacctcgcccttcaagtaccagagcctgctgaccaagaataaggcccgggtggtcattctgatggtgtggatcgtgtccggcctcacctccttcttgcccatccagatgcactggtaccgggccacccaccaggaagccatcaactgctacgccaaggagacgtgctgtgacttcttcacgaaccaagcctatgccattgcctcctccatcgtgtccttctacctacccctggtggtcatggtcttcgtctactccagggtcttccaggtggcccagaggcagctccagaagatcgacagatcggagggccgcttccatgcccaaaacctcagccaagtggagcaggatgggcggagcgggcacggacatcggaggtcctccaagttctgcttgaaggaacacaaggccctcaaaactctgggcatcatcatgggcactttcaccctgtgctggctgcccttcttcatcgtcaacatagtgcatgtgatccaggataacctcatccctaaggaagtttacatcctcctaaactgggtgggctacgtcaactctgctttcaatccccttatctactgccggagccctgacttcaggattgccttccaggagcttctgtgcctgcgcaggtcttccctgaaggcctatgggaatggctactccaacaacagtaacagcagaagcgactatgctggggagcacagtggatgtcacctggggcaggagaaagacagcgaactgctgtgtgaggaccccccaggcacggaagaccgtcaaggtactgtgcctagcgatagcgttgattcgcaggggaggaattgtagtacaaacgactcactgctgtaatgcagcttttctactttttatgaaccccctccccgcaacgaaacactatacagactatttaacttgagtgtaataaatttagaataaaattgtatagagatgtgcaggaggagggacggccttctgcctttttttttttatttttttaggctgtaaaaaaaagagaaagcatattcgagtgattgtttgttgtacagttcagttccttttttgcatggaacgtgtaagtttgtgtctgaagggctttggtcccagaggacctggggctgctatgttttgatgacttttccgtggatctacctcattgatcaagtattaggggtaatatatattgctgctggtcatctgtatgtgaaggagtcttttcttcctgcacccttgcactggaggatcttgagtatctcggacctttcagctgtgaacacggactctgctggcccctcttatttgctcaaacagggtgttgttgtaggcagggatttgaggggcagcttcagttgtgttcctgagcaaagtctaaagtttacagtaaataaattgtttgaccatg

SEQ ID NO: 211413 - DNA, 466 bp, Canis familiaris; identical to SEQ ID NO: 1306

SEQ ID NO: 211414 - DNA, 597 bp, Canis familiaris; identical to SEQ ID NO: 1307

SEQ ID NO: 211415 - DNA, 686 bp, Canis familiaris; identical to SEQ ID NO: 1308

SEQ ID NO: 211416 - DNA, 648 bp, Canis familiaris; identical to SEQ ID NO: 1309

SEQ ID NO: 211417 - DNA, 653 bp, Canis familiaris; identical to SEQ ID NO: 1310

SEQ ID NO: 211418 - DNA, 815 bp, Canis familiaris; identical to SEQ ID NO: 1311

SEQ ID NO: 211419 - DNA, 612 bp, Canis familiaris; identical to SEQ ID NO: 1312

SEQ ID NO: 211420 - DNA, 600 bp, Canis familiaris
gtygtgtgtctccgtccgccttctctcccacctaagtgcgtgccaccgccccatggaagattcgatggacatggacatgagccccctgsggssccagaasyayswktttggttgtgaactaaaggctgacaaagattaccactttaaggtggataatgatgaaaatgagcaccagttatctttaagaacggtcagtttgggagctggtgcaaaggatgaattgcacattgttgaagcagaggcaatgaattatgaaggcagymcraktaaagtcactctggcaactttgaaaatgtctgtacagccaacggtgtcccttgggggctttgaaataacaccacctgtggtcttacggttgaagtgtggttccggtcctgtgcatattagtggacagcacttagtagctgtagaggaagatgcagagtcagaagatgaagaagaggaggatgtgaaacttcttartatatctggaaagcgttctgcccctggaagtggtagcaaggktycacaraaaaaagtaaaacttgytgytgatgaagatgatgacgacgacgacsatgacgacgacsatgatgaaaaagatgatgatgatgatttgtg

SEQ ID NO: 211421 - DNA, 600 bp, Canis familiaris
  misc_feature (441)..(441): n is a, c, g, or t
  misc_feature (463)..(463): n is a, c, g, or t
  misc_feature (545)..(545): n is a, c, g, or t
  misc_feature (548)..(548): n is a, c, g, or t
  misc_feature (565)..(565): n is a, c, g, or t
  misc_feature (589)..(589): n is a, c, g, or t
  misc_feature (594)..(594): n is a, c, g, or t
gtgtcagagaagsacgakccaggatctgaaattcggggtggagcaggacgtagatatggtgtttgcgtctttcatccgcaaggcrgctgatgtccatgaggtcaggaaggtcctgggagagaaagggaagaacatcaagataatcagcaaaattgagaatcatgagggagttcggaggtttgatgagatcctggaagccagcgatggcatcatggtggctcgaggtgatctaggcattgagattcctgcagagaaggtcttccttgctcagaagatgatgattgggcggtgcaaccgagcgggcaagcctgtcatctgtgcgacacagatgctggagagcatgatcaagaagcctcgtcccacccgggctgagggcagtgatgtggccaatgcagtgctggatggagctgactgcatcatgctgtctggagagacccgccnaagggggattacccccttggangcttgttccatgcagcacctgatacttgtgaggctgaggcagccatgtttcaccgaagctggttgaagaacttgtgcgaggnttnaagcacttcacaacctnatggaagccttggcatgggcaggngggangctttt

SEQ ID NO: 211422 - DNA, 849 bp, Canis familiaris; identical to SEQ ID NO: 1315
  misc_feature (18)..(18): n is a, c, g, or t
  misc_feature (37)..(37): n is a, c, g, or t
  misc_feature (41)..(41): n is a, c, g, or t
  misc_feature (66)..(66): n is a, c, g, or t
  misc_feature (88)..(88): n is a, c, g, or t
  misc_feature (105)..(105): n is a, c, g, or t
  misc_feature (107)..(107): n is a, c, g, or t
  misc_feature (127)..(127): n is a, c, g, or t
  misc_feature (138)..(138): n is a, c, g, or t
  misc_feature (183)..(183): n is a, c, g, or t
  misc_feature (197)..(197): n is a, c, g, or t
  misc_feature (219)..(219): n is a, c, g, or t
  misc_feature (240)..(240): n is a, c, g, or t

SEQ ID NO: 211423 - DNA, 600 bp, Canis familiaris
  misc_feature (401)..(401): n is a, c, g, or t
  misc_feature (431)..(431): n is a, c, g, or t
  misc_feature (435)..(435): n is a, c, g, or t
  misc_feature (438)..(438): n is a, c, g, or t
  misc_feature (463)..(463): n is a, c, g, or t
  misc_feature (483)..(483): n is a, c, g, or t
  misc_feature (538)..(538): n is a, c, g, or t
  misc_feature (553)..(553): n is a, c, g, or t
  misc_feature (557)..(557): n is a, c, g, or t
  misc_feature (568)..(568): n is a, c, g, or t
ggggagcagacttgtcttgctgtctttgtcagaagagtttctaastaagggctgtgtctttgtggattaccttcttttattcttcctgccaragctcatgctargaggatgttgggggtaggattagcttgatttttctctattcattcttctctccttctgtctgctccctgcttagccctcggttttctcattcctctggagttctcttaaagcagcccctgttagttggctggcaagggaatttctggtgactgtagttccttagttaagtcttagcaatcaaaccaaatcaatgtctcccttgattctcctctgtatatctgtgtgtatgtatgtgtgtgtcttggtttggggtaaaggggagggaggggcaagacaatgtggaatctctaaggtgnatgcataaggaacctacaccggtaagtctnaatnggnccttattgttaaaaacctttggggnggctgctttgggggggaaanctggtcaagccccttaggccatttggcccaaaactacttggccttgggttgttgntttccaaaaggtttngggnaaaacccttgnggaaagaccttaagcctttgcttggaacggtt

SEQ ID NO: 211424 - DNA, 654 bp, Canis familiaris; identical to SEQ ID NO: 1317

SEQ ID NO: 211425 - DNA, 1400 bp, Canis familiaris
aaggacatcgcccaggacatggtcctgtaccacgtgagatgcgacaaggacgaaatccagctgatcctgccaacgagggagcgcctggggaaggagcctgcggactgtgaggaggatgagctgggaatactcttgaaggaggtgctgccggggccaagcaagttcgacatctacgagttccacttctcggacctggagtgcacggagctggagctggtcaagtgcggcatccagatgtactacgagctgggcgtggtccgcaagttccagattcctcaggaggtcctggtgcgcttcctgttctccgtgagcaaagggtaccggaggatcacctaccacaactggcgccacggcttcaacgtggcccagaccatgttcacgctgctcacgacgggcaagctgaagagctactacacggacctggaggccttcgccatggtgacggcgggcctgtgccacgacatcgaccaccgcggcaccaacaacctgtaccagatgaaatcccagaaccccctggccaagctccacggctcctccatcctggagcggcaccacctggagttcgggaagttcctgctctccgaggagaccctgaacatctaccagaacctgaaccggcggcagcacgagcacgtgatccacctcatggacatagccatcatcgccaccgacctggcactctacttcaagaagaggacaatgttccagaagatcgtggatgagtctaagaactacgaggacaggaagagctgggtggagtacctgtccctggagacgacgcggaaggagatagtcatggccatgatgatgacggcgtgtgacctgtctgccatcaccaagccctgggaagtccagagcaaggttgctctgttggtggcggctgagttctgggaacaaggggacttggaaagaacagttctggatcagcagcctattccgatgatggaccggaacaaggcagccgagctccccaaactacaggttggcttcatcgacttcgtgtgcacgttygtgtacaaggagttttcccgtttccacgaagagatcctgcccatgttcgaccgactgcagaacaacaggaaggaatggaaggccttggctgatgagtacgaggccaagctgaaggccctggaggaggagaagcagcaacaagaggacaggacgacagccaagaaagcgggcacagagatttgcaacggtggccccgcacccaagtcttccacctgctgcatcctgtgagctgctcccgggttcggacggcgcccccgcctctaagggtttgctacatgtgaggaagccccagaaaatgactaaagacaattttggatatcttgaaacttttttaagatctgtgtttttataaactcaactatgaataaagtttagtgtacctcaaaaaa

SEQ ID NO: 211426 - DNA, 481 bp, Canis familiaris; identical to SEQ ID NO: 1319

SEQ ID NO: 211427 - DNA, 318 bp, Canis familiaris; identical to SEQ ID NO: 1320

SEQ ID NO: 211428 - DNA, 270 bp, Canis familiaris; identical to SEQ ID NO: 1321

SEQ ID NO: 211429 - DNA, 769 bp, Canis familiaris; identical to SEQ ID NO: 1322

SEQ ID NO: 211430 - DNA, 717 bp, Canis familiaris; identical to SEQ ID NO: 1323

SEQ ID NO: 211431 - DNA, 619 bp, Canis familiaris; identical to SEQ ID NO: 1324

SEQ ID NO: 211432 - DNA, 510 bp, Canis familiaris; identical to SEQ ID NO: 1325

SEQ ID NO: 211433 - DNA, 686 bp, Canis familiaris; identical to SEQ ID NO: 1326

SEQ ID NO: 211434 - DNA, 406 bp, Canis familiaris; identical to SEQ ID NO: 1327

SEQ ID NO: 211435 - DNA, 663 bp, Canis familiaris; identical to SEQ ID NO: 1328

SEQ ID NO: 211436 - DNA, 641 bp, Canis familiaris; identical to SEQ ID NO: 1329

SEQ ID NO: 211437 - DNA, 659 bp, Canis familiaris; identical to SEQ ID NO: 1330

SEQ ID NO: 211438 - DNA, 593 bp, Canis familiaris; identical to SEQ ID NO: 1331

SEQ ID NO: 211439 - DNA, 600 bp, Canis familiaris
  misc_feature (371)..(371): n is a, c, g, or t
  misc_feature (377)..(377): n is a, c, g, or t
  misc_feature (379)..(379): n is a, c, g, or t
  misc_feature (400)..(400): n is a, c, g, or t
  misc_feature (405)..(405): n is a, c, g, or t
  misc_feature (418)..(418): n is a, c, g, or t
  misc_feature (446)..(447): n is a, c, g, or t
  misc_feature (458)..(458): n is a, c, g, or t
  misc_feature (519)..(519): n is a, c, g, or t
  misc_feature (530)..(530): n is a, c, g, or t
  misc_feature (546)..(546): n is a, c, g, or t
  misc_feature (593)..(593): n is a, c, g, or t
ttggaaaagtaacttttatttggaagatgatctcacatgagaattagggccgagattgtaagctcttgcagcagtgatgtttgttcttgggctttggtgatttctaggttttgaggtgctttgtgctttcttgtgtgacttgatatagctccctggatctttgatktctgtgtcacatgagactcaagagttggagtcttccagctctggaggtgctgaaggagctgcttacttytggaagattgcttcgtgcagcaactgctcaagaagctgaagaagaagggaccagacttcaactgggaatgtgaatggggttgacctgctaggactgaggagtcgaaaggaggtgtggaggatgatagtaatgctgnattttncngactttaattctgtgtgaganccaangaaaaaagatganttttgttcaaaattaaatttatgtgggnnctatttgatgnacctgctggcagtttatttgacaacccacccaatttatttgttttggacctaaataacaanacttggtttgnacaagtgatggatatntgacatttagggatccatggaaaaaatattcaaagctttgagggtgntggaaaa

SEQ ID NO: 211440 - DNA, 322 bp, Canis familiaris; identical to SEQ ID NO: 1333

SEQ ID NO: 211441 - DNA, 863 bp, Canis familiaris; identical to SEQ ID NO: 1334
  misc_feature (40)..(40): n is a, c, g, or t
  misc_feature (127)..(127): n is a, c, g, or t
  misc_feature (612)..(612): n is a, c, g, or t
  misc_feature (648)..(648): n is a, c, g, or t
  misc_feature (655)..(655): n is a, c, g, or t
  misc_feature (661)..(661): n is a, c, g, or t
  misc_feature (696)..(696): n is a, c, g, or t
  misc_feature (713)..(713): n is a, c, g, or t
  misc_feature (724)..(724): n is a, c, g, or t
  misc_feature (750)..(750): n is a, c, g, or t
  misc_feature (781)..(781): n is a, c, g, or t
  misc_feature (815)..(815): n is a, c, g, or t
  misc_feature (836)..(836): n is a, c, g, or t
  misc_feature (848)..(848): n is a, c, g, or t
  misc_feature (851)..(851): n is a, c, g, or t

SEQ ID NO: 211442 - DNA, 847 bp, Canis familiaris; identical to SEQ ID NO: 1335

SEQ ID NO: 211443 - DNA, 655 bp, Canis familiaris; identical to SEQ ID NO: 1336

SEQ ID NO: 211444 - DNA, 713 bp, Canis familiaris; identical to SEQ ID NO: 1337

SEQ ID NO: 211445 - DNA, 671 bp, Canis familiaris; identical to SEQ ID NO: 1338

SEQ ID NO: 211446 - DNA, 687 bp, Canis familiaris; identical to SEQ ID NO: 1339
  misc_feature (378)..(378): n is a, c, g, or t

SEQ ID NO: 211447 - DNA, 651 bp, Canis familiaris; identical to SEQ ID NO: 1340

SEQ ID NO: 211448 - DNA, 635 bp, Canis familiaris; identical to SEQ ID NO: 1341

SEQ ID NO: 211449 - DNA, 628 bp, Canis familiaris; identical to SEQ ID NO: 1342

SEQ ID NO: 211450 - DNA, 740 bp, Canis familiaris; identical to SEQ ID NO: 1343

SEQ ID NO: 211451 - DNA, 541 bp, Canis familiaris; identical to SEQ ID NO: 1344

SEQ ID NO: 211452 - DNA, 565 bp, Canis familiaris; identical to SEQ ID NO: 1345

SEQ ID NO: 211453 - DNA, 629 bp, Canis familiaris; identical to SEQ ID NO: 1346

SEQ ID NO: 211454 - DNA, 443 bp, Canis familiaris; identical to SEQ ID NO: 1347

SEQ ID NO: 211455 - DNA, 267 bp, Canis familiaris; identical to SEQ ID NO: 1348

SEQ ID NO: 211456 - DNA, 1400 bp, Canis familiaris
aggtctttcttatcagggaatgaggatccctcactggaggtggtgatccccagagcaggggtccttagtatgggccttggaatggtctagggatgatcccacactggatttgtaacatggaagtacccctacttgggatttgcatgccaaattgtggttctcatctgactggctcacccaaacaagaccatgtttccctctcattcggggtagatttatactccagggggaagttctagggctttagcgaatagtcccaagacctggactggcactggtgagtgccgggccgccaggaatgcccttcccaccagaggtcacgtttggtgggatgaacaaggaggcttgggttttccaccatcctgccactatgatgaggccatcatactctaggtggtggatctgttcaaggaaatttgaatcaaagctattaactttaagaccgagcacctactttgtgctcagtcctgattggtgctatgggctagagaagctcaccaagtaaacgttaaaatccagccttaccctcagggaccttgcattccagatggtaaaaatgccacacaccagtatgcaaaggctggcctcgcaccatggcaactgagcagctgaaccagcgcactcctcagcaggcggaaatgctgaactgagaatgtcagtgctcaggggcccacaggctaaccctgctcccacttcgtagcatttttgcttttcagggcacggcagcatttattactgtgtagccacatccctctgaagcagcagcatagctgacaatttaaaaataagaactaagaacatacctaagaccataacggcagacaagtagcagggccgagactagagttcaggacctctgactcccagagtgtcccgggagccaggtaatgctccctggaggtgcaaatagggttgggcaggggagaccagaagtgcttacagggagagaggacttggaggtgattttgcaggaggtgagggatgtgaattgcctgaatggcggaggctgttttgttcatgctgagacaccggggtgaaggtatgtgcagtcagttataaagaaaggctgccaaaggcaaggcgggagggaaagtgacatgttgaagaggtcttcagtggtcaaagaaatttgatatcagaagggtcaagaatcgaaagttctagaacggagattcatgagatagacagagtaagacccgttctggagagtatgacctagataatcattaccacccagccaggctgggatcttttaagcctttcacttacccaaacctggcaccatggctcattctcagagtgtgaaagttctaaaatgtaaatgaatgtctttttttgtaacttaaaaaattttttttcttgttaaaaaaaaaaaagtcaaataaattaactttgccccc

SEQ ID NO: 211457 - DNA, 485 bp, Canis familiaris; identical to SEQ ID NO: 1350
  misc_feature (447)..(447): n is a, c, g, or t
  misc_feature (456)..(456): n is a, c, g, or t

SEQ ID NO: 211458 - DNA, 737 bp, Canis familiaris; identical to SEQ ID NO: 1351
  misc_feature (236)..(236): n is a, c, g, or t

SEQ ID NO: 211459 - DNA, 737 bp, Canis familiaris; identical to SEQ ID NO: 1352
  misc_feature (502)..(502): n is a, c, g, or t

SEQ ID NO: 211460 - DNA, 746 bp, Canis familiaris; identical to SEQ ID NO: 1353

SEQ ID NO: 211461 - DNA, 735 bp, Canis familiaris; identical to SEQ ID NO: 1354

SEQ ID NO: 211462 - DNA, 447 bp, Canis familiaris; identical to SEQ ID NO: 1355

SEQ ID NO: 211463 - DNA, 884 bp, Canis familiaris; identical to SEQ ID NO: 1356

SEQ ID NO: 211464 - DNA, 449 bp, Canis familiaris; identical to SEQ ID NO: 1357
  misc_feature (311)..(311): n is a, c, g, or t
  misc_feature (421)..(421): n is a, c, g, or t

SEQ ID NO: 211465 - DNA, 515 bp, Canis familiaris; identical to SEQ ID NO: 1358
  misc_feature (497)..(497): n is a, c, g, or t

SEQ ID NO: 211466 - DNA, 714 bp, Canis familiaris; identical to SEQ ID NO: 1359

SEQ ID NO: 211467 - DNA, 600 bp, Canis familiaris
ctcttgattgcccgaacacctgaggtcacatgtgtggtggtggatctggrmccagaagaccctgaggtgcagatcagctggttcgtggacggtaagcagatgcaaacagccaagactcagcctcgtgaggagcagttcaatggcacctaccgtgtggtcagtgtcctccccattgggcaccaggactggctcaaggggaagcagttcacgtgcaaagtcaacaacaaagccctcccatccccgatcgagaggaccatctccaaggccagagggcargcccatcagcccagtgtgtatgtcctgccgccatcccgggaggagttgagcaagaacacagtcagcttgacatgcctgatcaaagacttcttcccacctgacattgatgtggagtggcagagcaatggacagcaggagcctgagagcaagtaccgcacgaccccgccccagctggacgaggacgggtcctacttcctgtacagcaagctctctgtggacaagagccgctggcagcggggagacaccttcatatgtgcggtgatgcatgaagctctacacaaccactacacacagraatccctctcccattctccgggtaaatga

SEQ ID NO: 211468 - DNA, 659 bp, Canis familiaris; identical to SEQ ID NO: 1361

SEQ ID NO: 211469 - DNA, 496 bp, Canis familiaris; identical to SEQ ID NO: 1362

SEQ ID NO: 211470 - DNA, 600 bp, Canis familiaris
  misc_feature (555)..(555): n is a, c, g, or t
atgaacgtcattggagaacctattgatgagagaggtcccatcaaaaccaaacaatttgcagctattcatgctgaagcccctgagtttgtggaaatgagtgttgagcaggaaattctggtaactggtatcaaggttgtggatctgctggctccctatgccaagggtggcaaaattgggctgtttggtggtgctggagttggcaagacagtactgatcatggagttaatcaacaatgtcgccaaagcccatggtggttactctgtgtttgctggtgttggyrmraggacccgtgaaggcaatgacttataccatgaaatgattgagtctggtgttatcaacttaaaagatgctacctccaaggtagcgctggtgtacggtcaaatgaatgaaccgcctggcgctcgcgcccgggtggctctgactggactgactgttgccgaatacttcagagaccaagagggtcaagatgtactgctctttatcgataacattttccgcttcacccaggctggctctgaggtgtctgctttattggggcaggatcccttctgctgngggctatcagcctaccttggccactgatatgggtaccatgcagga

SEQ ID NO: 211471 - DNA, 589 bp, Canis familiaris; identical to SEQ ID NO: 1364

SEQ ID NO: 211472 - DNA, 777 bp, Canis familiaris; identical to SEQ ID NO: 1365

SEQ ID NO: 211473 - DNA, 732 bp, Canis familiaris; identical to SEQ ID NO: 1366

SEQ ID NO: 211474 - DNA, 809 bp, Canis familiaris; identical to SEQ ID NO: 1367

SEQ ID NO: 211475 - DNA, 791 bp, Canis familiaris; identical to SEQ ID NO: 1368
  misc_feature (314)..(314): n is a, c, g, or t
  misc_feature (319)..(319): n is a, c, g, or t
  misc_feature (368)..(368): n is a, c, g, or t

SEQ ID NO: 211476 - DNA, 909 bp, Canis familiaris; identical to SEQ ID NO: 1369
  misc_feature (237)..(237): n is a, c, g, or t

SEQ ID NO: 211477 - DNA, 880 bp, Canis familiaris; identical to SEQ ID NO: 1370

SEQ ID NO: 211478 - DNA, 704 bp, Canis familiaris; identical to SEQ ID NO: 1371

SEQ ID NO: 211479 - DNA, 644 bp, Canis familiaris; identical to SEQ ID NO: 1372

SEQ ID NO: 211480 - DNA, 713 bp, Canis familiaris; identical to SEQ ID NO: 1373

SEQ ID NO: 211481 - DNA, 600 bp, Canis familiaris
  misc_feature (84)..(84): n is a, c, g, or t
  misc_feature (297)..(297): n is a, c, g, or t
  misc_feature (299)..(299): n is a, c, g, or t
  misc_feature (316)..(316): n is a, c, g, or t
  misc_feature (326)..(326): n is a, c, g, or t
  misc_feature (483)..(483): n is a, c, g, or t
ttctttcttcataaagtagaaataaggatggtttgtaccttagcgttctggggtagaaatggacataaatgatgcatggtggtnagggtggtgatggtggtgatgatggtgataaaggtgatggtgatgatggtggtggtggtgatggtggtgatggtgatgatgttgataatggtgatggtgatgatggagatggtgatggtggtagtggtgatggtagtsatggtagttatggcagagagagatctgggatggcagcccctggggatgtcacagttgggtggtggtggtggtggntnaggtcccatgagctccnagaccctagntgccccccagatacagcccctaccactcactcatcctgacccttccttcccatccccagaaactacgttttccagaggcggtttgtgcagttcaatgggaggagtctgatgtactttggcagtgataaggtgagggtctgagagatgctgtgttggncctggcaaaagagagggaaagggagggctcagaaaggctcaggatggtagaggggaagcccgtggtagggggttaccacatggctgatgtgagcatcaaaagtagctaggttagcag

SEQ ID NO: 211482 - DNA, 506 bp, Canis familiaris; identical to SEQ ID NO: 1375

SEQ ID NO: 211483 - DNA, 699 bp, Canis familiaris; identical to SEQ ID NO: 1376

SEQ ID NO: 211484 - DNA, 634 bp, Canis familiaris; identical to SEQ ID NO: 1377

SEQ ID NO: 211485 - DNA, 800 bp, Canis familiaris; identical to SEQ ID NO: 1378

SEQ ID NO: 211486 - DNA, 553 bp, Canis familiaris; identical to SEQ ID NO: 1379
  misc_feature (204)..(204): n is a, c, g, or t

SEQ ID NO: 211487 - DNA, 1400 bp, Canis familiaris
ccgcgctcgccgcgggaaaccccggtggggacgcggcccccgcagccacgggcaccgcggcccccgcctcttcggcccccgccggcggtgaggacgcggagaagaaagttctcgccaccaaagtccttggcactgtcaaatggttcaacgtcagaaatggatatggatttataaatcgaaatgacaccaaagaagatgtatttgtacatcasactgccatcaagaagaataacccacggaaatacctgcgcagtgtaggagatggagaaactgtasaatttgatgtggttgaaggagagaagggtgcagaagcagccaatgtgactggaccagacggagttcctgtagaagggagccgttaygctgctgatcggcgtcgatacagacgtggttactatggcagacgccgtggacctccccgtaatkmcgstgrgattggagagatgaaggagggagtcccagaggggacacagctgcagggaccggttcatcgaaatccaacttaccgcccaaggtaccggagaggccctcctcgcccccgacctgccccagctgttggtgaggctgaagataaagagaaccaacaagcagccaatggtccaaaccagccatctgctcgccgtggataccggcgcccatacaactatcggcgtcgcccccgcccccctaatgctccttcacaagatggcaaagagaccaaggcacctgaagttccatctgagaaccccgctccagccaccgagcagagcagtgctgagtaacaccaggctccccaggcacctttaccatcaccaggtgacctagagaattaatgaccattagagaagataaagcataaagcagaccatgaccttaccaacaccaaagagacatccaagcaataatgtggaagactaataaccaagatgtggacattagaatgtttactattattctttatgatacagacaactacaaaacaaaaatgtcagccaatatttctagcaagctgagatcccgggaatgcctgcacaaaagacaagagagcaacctccccagtttcagcaaccactaggtttatatttttttcctggtttttactgttttggtaatatgaattgaaaaaaaaaatattaataccacatggggagaaccccaaccaaagaaacctgaaatatatagtaaatgcttttttttccttttttgttcattttggtagctggtgctaaacttccaagtgtcgtgatttaaaaagaaattttatgcccttcttatttatttctaggatgaggggaggataacatttttgctttcttatgtgactctttaaaaatgtgcagtatgaagttcctcaaaaataaaatttttacccttgaaaaaaaaaaaaaaaaaaaaaaaaaaaaaaaaaaaaaaaaaaaaaa

SEQ ID NO: 211488 - DNA, 654 bp, Canis familiaris; identical to SEQ ID NO: 1381

SEQ ID NO: 211489 - DNA, 645 bp, Canis familiaris; identical to SEQ ID NO: 1382

SEQ ID NO: 211490 - DNA, 585 bp, Canis familiaris; identical to SEQ ID NO: 1383

SEQ ID NO: 211491 - DNA, 478 bp, Canis familiaris; identical to SEQ ID NO: 1384

SEQ ID NO: 211492 - DNA, 937 bp, Canis familiaris; identical to SEQ ID NO: 1385
  misc_feature (368)..(368): n is a, c, g, or t
  misc_feature (485)..(485): n is a, c, g, or t

SEQ ID NO: 211493 - DNA, 1030 bp, Canis familiaris; identical to SEQ ID NO: 1386

SEQ ID NO: 211494 - DNA, 680 bp, Canis familiaris; identical to SEQ ID NO: 1387

SEQ ID NO: 211495 - DNA, 1079 bp, Canis familiaris; identical to SEQ ID NO: 1388

SEQ ID NO: 211496 - DNA, 674 bp, Canis familiaris; identical to SEQ ID NO: 1389

SEQ ID NO: 211497 - DNA, 910 bp, Canis familiaris; identical to SEQ ID NO: 1390
  misc_feature (173)..(173): n is a, c, g, or t

SEQ ID NO: 211498 - DNA, 944 bp, Canis familiaris; identical to SEQ ID NO: 1391

SEQ ID NO: 211499 - DNA, 889 bp, Canis familiaris; identical to SEQ ID NO: 1392

SEQ ID NO: 211500 - DNA, 649 bp, Canis familiaris; identical to SEQ ID NO: 1393

SEQ ID NO: 211501 - DNA, 451 bp, Canis familiaris; identical to SEQ ID NO: 1394

SEQ ID NO: 211502 - DNA, 736 bp, Canis familiaris; identical to SEQ ID NO: 1395

SEQ ID NO: 211503 - DNA, 738 bp, Canis familiaris; identical to SEQ ID NO: 1396

SEQ ID NO: 211504 - DNA, 683 bp, Canis familiaris; identical to SEQ ID NO: 1397

SEQ ID NO: 211505 - DNA, 443 bp, Canis familiaris; identical to SEQ ID NO: 1398

SEQ ID NO: 211506 - DNA, 658 bp, Canis familiaris; identical to SEQ ID NO: 1399

SEQ ID NO: 211507 - DNA, 347 bp, Canis familiaris; identical to SEQ ID NO: 1400

SEQ ID NO: 211508 - DNA, 708 bp, Canis familiaris; identical to SEQ ID NO: 1401

SEQ ID NO: 211509 - DNA, 600 bp, Canis familiaris; identical to SEQ ID NO: 1402

SEQ ID NO: 211510 - DNA, 626 bp, Canis familiaris; identical to SEQ ID NO: 1403

SEQ ID NO: 211511 - DNA, 774 bp, Canis familiaris; identical to SEQ ID NO: 1404

SEQ ID NO: 211512 - DNA, 757 bp, Canis familiaris; identical to SEQ ID NO: 1405

SEQ ID NO: 211513 - DNA, 641 bp, Canis familiaris; identical to SEQ ID NO: 1406

SEQ ID NO: 211514 - DNA, 611 bp, Canis familiaris; identical to SEQ ID NO: 1407

SEQ ID NO: 211515 - DNA, 678 bp, Canis familiaris; identical to SEQ ID NO: 1408

SEQ ID NO: 211516 - DNA, 591 bp, Canis familiaris; identical to SEQ ID NO: 1409

SEQ ID NO: 211517 - DNA, 620 bp, Canis familiaris; identical to SEQ ID NO: 1410

SEQ ID NO: 211518 - DNA, 521 bp, Canis familiaris; identical to SEQ ID NO: 1411

SEQ ID NO: 211519 - DNA, 617 bp, Canis familiaris; identical to SEQ ID NO: 1412

SEQ ID NO: 211520 - DNA, 431 bp, Canis familiaris; identical to SEQ ID NO: 1413
  misc_feature (393)..(393): n is a, c, g, or t

SEQ ID NO: 211521 - DNA, 461 bp, Canis familiaris; identical to SEQ ID NO: 1414

SEQ ID NO: 211522 - DNA, 731 bp, Canis familiaris; identical to SEQ ID NO: 1415

SEQ ID NO: 211523 - DNA, 996 bp, Canis familiaris; identical to SEQ ID NO: 1416

SEQ ID NO: 211524 - DNA, 738 bp, Canis familiaris; identical to SEQ ID NO: 1417

SEQ ID NO: 211525 - DNA, 744 bp, Canis familiaris; identical to SEQ ID NO: 1418

SEQ ID NO: 211526 - DNA, 674 bp, Canis familiaris; identical to SEQ ID NO: 1419

SEQ ID NO: 211527 - DNA, 655 bp, Canis familiaris; identical to SEQ ID NO: 1420

SEQ ID NO: 211528 - DNA, 655 bp, Canis familiaris; identical to SEQ ID NO: 1421

SEQ ID NO: 211529 - DNA, 658 bp, Canis familiaris; identical to SEQ ID NO: 1422

SEQ ID NO: 211530 - DNA, 600 bp, Canis familiaris
  misc_feature (552)..(552): n is a, c, g, or t
  misc_feature (570)..(570): n is a, c, g, or t
  misc_feature (580)..(580): n is a, c, g, or t
  misc_feature (583)..(583): n is a, c, g, or t
acctcgtaaggggaaggaaaagaagkaagaacaggtcatcagccttggacctcaagttgctgaaggagaaaatgtgtttggtgtctgccacatatttgcatccttcaatgacacttttgtccatgtcactgatctttctggcaaggaaaccatctgtcgcgtaactggtgggatgaaggtgaaggctgaccgagatgagtcttctccctacgctgccatgttggctgcccaggatgtggcccagaggtgcaaggagctgggcatcactgctctccacatcaaactccgagccacaggaggaaatagaaccaagacccctggacctggggcccagtcagccctcagagcccttgcccgctcaggaatgaagattgggcggattgaggatgtcacccccatccccttcgatagcacccccaggaagggaggtcgccgtggtcgccgtcttgtgaacaagaatttttaaactattttttgttaataaatggcctttgggtagctaaaaaaaaaaaaaaaaaggcgggccgttttaaggatccaagcttacgtacnctcatgcgacgtcatagnttttttttgngtncctaaattaattaatgg

SEQ ID NO: 211531 - DNA, 724 bp, Canis familiaris; identical to SEQ ID NO: 1424

SEQ ID NO: 211532 - DNA, 704 bp, Canis familiaris; identical to SEQ ID NO: 1425

SEQ ID NO: 211533 - DNA, 655 bp, Canis familiaris; identical to SEQ ID NO: 1426

SEQ ID NO: 211534 - DNA, 625 bp, Canis familiaris; identical to SEQ ID NO: 1427

SEQ ID NO: 211535 - DNA, 730 bp, Canis familiaris; identical to SEQ ID NO: 1428
  misc_feature (157)..(157): n is a, c, g, or t
  misc_feature (397)..(397): n is a, c, g, or t

SEQ ID NO: 211536 - DNA, 677 bp, Canis familiaris; identical to SEQ ID NO: 1429
  misc_feature (61)..(62): n is a, c, g, or t

SEQ ID NO: 211537 - DNA, 663 bp, Canis familiaris; identical to SEQ ID NO: 1430

SEQ ID NO: 211538 - DNA, 661 bp, Canis familiaris; identical to SEQ ID NO: 1431

SEQ ID NO: 211539 - DNA, 570 bp, Canis familiaris; identical to SEQ ID NO: 1432

SEQ ID NO: 211540 - DNA, 568 bp, Canis familiaris; identical to SEQ ID NO: 1433

SEQ ID NO: 211541 - DNA, 678 bp, Canis familiaris; identical to SEQ ID NO: 1434

SEQ ID NO: 211542 - DNA, 762 bp, Canis familiaris; identical to SEQ ID NO: 1435

SEQ ID NO: 211543 - DNA, 712 bp, Canis familiaris; identical to SEQ ID NO: 1436

SEQ ID NO: 211544 - DNA, 736 bp, Canis familiaris; identical to SEQ ID NO: 1437

SEQ ID NO: 211545 - DNA, 466 bp, Canis familiaris; identical to SEQ ID NO: 1438

SEQ ID NO: 211546 - DNA, 668 bp, Canis familiaris; identical to SEQ ID NO: 1439

SEQ ID NO: 211547 - DNA, 695 bp, Canis familiaris; identical to SEQ ID NO: 1440

SEQ ID NO: 211548 - DNA, 636 bp, Canis familiaris; identical to SEQ ID NO: 1441

SEQ ID NO: 211549 - DNA, 722 bp, Canis familiaris; identical to SEQ ID NO: 1442

SEQ ID NO: 211550 - DNA, 678 bp, Canis familiaris; identical to SEQ ID NO: 1443

SEQ ID NO: 211551 - DNA, 506 bp, Canis familiaris; identical to SEQ ID NO: 1444

SEQ ID NO: 211552 - DNA, 645 bp, Canis familiaris; identical to SEQ ID NO: 1445
  misc_feature (623)..(623): n is a, c, g, or t

SEQ ID NO: 211553 - DNA, 638 bp, Canis familiaris; identical to SEQ ID NO: 1446
  misc_feature (635)..(635): n is a, c, g, or t

SEQ ID NO: 211554 - DNA, 776 bp, Canis familiaris; identical to SEQ ID NO: 1447

SEQ ID NO: 211555 - DNA, 659 bp, Canis familiaris; identical to SEQ ID NO: 1448

SEQ ID NO: 211556 - DNA, 644 bp, Canis familiaris; identical to SEQ ID NO: 1449

SEQ ID NO: 211557 - DNA, 710 bp, Canis familiaris; identical to SEQ ID NO: 1450

SEQ ID NO: 211558 - DNA, 697 bp, Canis familiaris; identical to SEQ ID NO: 1451

SEQ ID NO: 211559 - DNA, 576 bp, Canis familiaris; identical to SEQ ID NO: 1452

SEQ ID NO: 211560 - DNA, 743 bp, Canis familiaris; identical to SEQ ID NO: 1453

SEQ ID NO: 211561 - DNA, 565 bp, Canis familiaris; identical to SEQ ID NO: 1454

SEQ ID NO: 211562 - DNA, 761 bp, Canis familiaris; identical to SEQ ID NO: 1455
  misc_feature (176)..(176): n is a, c, g, or t
  misc_feature (202)..(202): n is a, c, g, or t

SEQ ID NO: 211563 - DNA, 724 bp, Canis familiaris; identical to SEQ ID NO: 1456

SEQ ID NO: 211564 - DNA, 754 bp, Canis familiaris; identical to SEQ ID NO: 1457

SEQ ID NO: 211565 - DNA, 742 bp, Canis familiaris; identical to SEQ ID NO: 1458
  misc_feature (199)..(199): n is a, c, g, or t

SEQ ID NO: 211566 - DNA, 708 bp, Canis familiaris; identical to SEQ ID NO: 1459

SEQ ID NO: 211567 - DNA, 776 bp, Canis familiaris; identical to SEQ ID NO: 1460
  misc_feature (216)..(216): n is a, c, g, or t

SEQ ID NO: 211568 - DNA, 757 bp, Canis familiaris; identical to SEQ ID NO: 1461

SEQ ID NO: 211569 - DNA, 741 bp, Canis familiaris; identical to SEQ ID NO: 1462

SEQ ID NO: 211570 - DNA, 317 bp, Canis familiaris; identical to SEQ ID NO: 1463

SEQ ID NO: 211571 - DNA, 600 bp, Canis familiaris
ttgaagaagatcctgaaatttccttagctgactattggaagtgtacctcatgcaatgaaatgaatcctcctcttccacctcattgcaatagatgttgggcccttcgtgagaattggcttcctgaagataaagggaaaatccctgagaaagccacaccagaaaactcaacacaagtagaagagggctttgatgtccctgattgtaaaaaagctgcagccagtgattccagagaatcatgtgctgaggaaattgatgataaaatcacacaagcctcccactcccaagaaagtgaggactattctcagccatcaacttctaacagcatcatttatagcagccaagaagatgtcaaagaatttgagagagaagaaacacaagacaaagaagaaattgtggaatctagttttccccttaatgccattgaaccttgtgtgatttgccaaggtcgacctaaaaacggttgcattgttcatggcaaaacaggacatcttatggcatgcttcacgtgtgcaaagaagctaaagaaaaggaataagccctgtccagtatgtagacaaccaattcaaatgattgtgctaacttatttcccctagwwgmcct

SEQ ID NO: 211572 - DNA, 598 bp, Canis familiaris; identical to SEQ ID NO: 1465

SEQ ID NO: 211573 - DNA, 382 bp, Canis familiaris; identical to SEQ ID NO: 1466

SEQ ID NO: 211574 - DNA, 708 bp, Canis familiaris; identical to SEQ ID NO: 1467

SEQ ID NO: 211575 - DNA, 699 bp, Canis familiaris; identical to SEQ ID NO: 1468

SEQ ID NO: 211576 - DNA, 732 bp, Canis familiaris; identical to SEQ ID NO: 1469

SEQ ID NO: 211577 - DNA, 600 bp, Canis familiaris
tgtgtgtgtgtgtgtgtgtgtgtgtgtgtgtccgtgtgtgtctgtgtgtgtgtgcgtgtgcagggtcagagaagagtctgggtcatacccaccccaaagtgatgggaagaaacggttaattctgatatgctctgaacccagtcttactgcctggaccaggcttatctawaacactttccagggcaaactctaagaaggcagtgaggatggctgcsttacttgtttaccacactatggacccagaaaggatatggagacccaccagtctccagaaggaagggctcagaggccgtggtgtccagaacagtaaagccatacctggatgctttcacggaggcaccctggaaaactctccacatgccagttttcctgaaatgacatgtccaggaaagtagtctgttctttctccctccccattctaggaaaagtgcagaaaatacaggtgctcctcaagttcttgacctctggggaagttctatttgcacaaagaccctatttgagcaaggttacctgtgctctttggcccaatatgctcttattgaggagaattccaaggtcagtataaggttctttatagagatagattatcaggggtggggg

SEQ ID NO: 211578 - DNA, 1400 bp, Canis familiaris
gtgctgctggacctcgagccacgggtgatccactccatcctcaactccccctatgccaagctctacaacccagagaacatctacctgtcagagcatggaggaggagctggcaacaattgggccagtggattctcgcagggagagaagatccacgaagacatttttgacatcatagaccgggaggcagatggtagtgacagtctagagggcttcgtgctgtgtcactccattgctggggggacaggctctggcctaggctcctacctcttagaacggctgaatgacaggtaccccaagaagctggtgcagacatactcagtgtttcccaaccaggacgagatgagcgatgtggtggtccagccctacaactccctgctcacacttaagaggctgactcagaatgcagactgtgtggtggtgctggacaacacaaccctgaaccggatcgccacaaaccgtctgcacattcaaaacccgtccttcttccaaatcaaccaactggtgtccaccatcatgtcggccagcaccaccaccctgcgctaccccggctacatgaacaatgacctcatcggcctcattgcctcgctcattcccactcctcgactccacttcctcatgactggctacaccccgctcaccacggaccagtcggtggccagcgtgaggaagaccacggtcctggatgtcatgaggcggttgctgcagcccaagaacgtgatggtgtccacagsccgggatcgccagaccaaccactgctacatcgccatcctcaacatcatccagggggaggtggaccccacccaggtgcacaagagtctgcagaggatccgggaacggaagctggccaacktcatcccctggggccctgccagcatccaggtggccctgtcaaggaagtctccctacctgccttcggcccaccgggtcagtgggctcatgatggccaaccataccagcatctcctcgctctttgagcggacctgtcgccagtatgacaagctgcggaagcgggaggccttcctggagcagttccgcaaggaggacatcttcaaggagaacttcgacgaattggacacgtccagggaagttgtgcakcagctcattgacgagtaccatgcagccacacggccggactacatctcctggggcgcccaggagcagtgagtaccccaggatggggacctcatctgccttaccggttggcccaggccctgcctgactgaccaccccctyagagaacagatcagggacctcacatatttctttctcagaaatacactcacacgtattctgtatcggcttggggatgtgtttatgtctcctcttatgagactatttatgtttaataaagcactggacataaatcaaaaaaaaaaaaaaaaaaaaaaaaaaaaaaaaaa

SEQ ID NO: 211579 - DNA, 747 bp, Canis familiaris; identical to SEQ ID NO: 1472
  misc_feature (197)..(197): n is a, c, g, or t
  misc_feature (311)..(311): n is a, c, g, or t

SEQ ID NO: 211580 - DNA, 716 bp, Canis familiaris; identical to SEQ ID NO: 1473
  misc_feature (33)..(34): n is a, c, g, or t

SEQ ID NO: 211581 - DNA, 397 bp, Canis familiaris; identical to SEQ ID NO: 1474

SEQ ID NO: 211582 - DNA, 1400 bp, Canis familiaris
atactttccttagaattgatactgcagttcttagtattaagcattttgtctgaacagatgaagattagtgagcatgcccctgcaccgtggtcagaaaacatgctgcagactgcgtgtttgtgatggaaaaaccgtcagtattggctggagggtcagagatggtttgctttgtaatgatttttgtacttttttacagtcactgcttacttcactgatttccgttaaaataccagccagtaaatggggtgcatttgagttttattctttccaaagtacactgtttcaaacttgattatggccctggcttggcatacacattttattttattatgcatgaggtaatatgcacacatttaaaaaatatacctggagcatataaaccagtgtagtagatttaacagaaatgtacagcaaggggaatttgtagctttgggggggtgggggggatggtagggaagtcaagtgaagacaattacttattgtatatggaaacacatttttttagggaaggacaccaaagcatgtgagactggttctgtggcctctttggatctataaattaaccatatcaccacagacatactaaccagcaggaatgccttaccctcatatttttaattcttagatcattctctctgtgtattactaagtttatatggcttttgtgcacatctagttactgtatcatgaaaaagattgagtaaattgtggatttggtkgtttcagaaatgtataatcacccagagaaaataatggtgtgatttggggattcccccacccaccacccccaccaaggggcagtggtggtttttctgttcttttggctatgcatttgaaaattttgacattttaaggatgcttgtacataatgcgtgcataccacttttgttcttggtttgtaaattaacttttataaactttaccttttttatacataaacaaaaccgagtttcttaaggctacctttgtatttctctcctgtacctcttgagccttgaactttgacctctgcagcaataaagcagcatttctatgacacatacaaggtcattttttaaagaaaaagaatgcacagagttgttacatttttaagtgctgcatttaaaagatacagttactcagaattctctagtttgattaaattcttgcaaagtatcctgactgtaatttgtgataccatgctgtgccctaaagtgtatttttttactaatagacaatttattatggcacatcagcacgatttctgtttagataatacaccactacattctgttaatcaatcattaggtgtgactgaatttcttttgcagttattaaaaaatctcaaatttctaaatctgcggaataaaactttttaaaataaaaaaaaaaaaaaaaaaaaaaaaaaaaaaaaaaaaaaa

SEQ ID NO: 211583 - DNA, 1400 bp, Canis familiaris
tcatgtacccaccaccctactatgtaggcatgggaaatggaacccagatttatgtcatcgatcctgaaccttgcccagattctgacttcctcctctggatccttgcagcagtcagttcgggcttgtttttttatagctttcttatcacagctgtttctttgagcaaaatgctaaagaaaagaagccctcttaccacaggggtctatgtgaaaatgcccccaactgrgccagaatgtgaaaagcaatttcagccttattttattcccatcaattgagagatcattatgaagaagaaagaatattttccaatttccaggagctgaggcaattyyaactttgtgctatccagctatgtgtacttgtttgtatattttggggggggtttcatctctctttaatataaagctggatgcagaacccaaatgaagtgtactacaaattcaaagcaaaggtgcaagaaaacagagccaggatgtttctgtcacatcagatccaattttcgtaaaagtatcacttgggagcaatatggggatgcagcattaggacatgcgctctaggatataggttagggagtggtgcggtccaaagaaagcaaaggagagagagtcagggagaggatgatattgtacacactttgtatttacatgtgagaagtttatagctgaagtgacgttttcaagttaaatttttgtgctatgttatttttcataaatgtaaaatcacgtgaagactttaaaaatattcacatggctatattttagccagtgattccaaaggttgtattgtaccaatatatatttttttatctgatagtattatgcatgggggccacatgtgcttttgtgtatttgttgatggtttcaatataaacactatatggcagtgtcttcccaccaggggctcaggggaagttttatggagggattcaggacactaatacgccaggtaaaatacaaggtcacttggtaactggcttggaaactggatgaggtcatagttgattcttgtagacgtgttgggctaaattggtgttgacatgtgctttgggcttttatgttagctcctttcaaagatttgtaagggagtcaaaactggtatatctgatttaactccatagaacaccatcgtcaagtaaacggctcattccaggagtcttggaggtatgaacttcaaggaagctctagtttcacaagggccccaattccttgctcatggttaatgccatgggcagaaaacagcagcaggtggcagaacagggtgatgaaggtttccgaaaacaaacactgttggtgtttttttaactcactattttctgtgaaaatgcaacaacatgtataatatttttaattaaataaaaatctgtggtggtcattaaaaaaaaaaaaaaaaaaaaaaaaaaa

SEQ ID NO: 211584 - DNA, 652 bp, Canis familiaris; identical to SEQ ID NO: 1477

SEQ ID NO: 211585 - DNA, 615 bp, Canis familiaris; identical to SEQ ID NO: 1478

SEQ ID NO: 211586 - DNA, 651 bp, Canis familiaris; identical to SEQ ID NO: 1479

SEQ ID NO: 211587 - DNA, 600 bp, Canis familiaris
accgggaatcttggccttctgtcttttacaatcggacctgccagtgctttggtaacttcatgggattcaactgtggaaattgcaagtttggcttttggggacaaaactgcacagagarrcgacttttggtgagaaaaaacatctttgatttgagtgtcccagagaagracaaatttcttgcctaccttactttagcaaagcatactaccagcccagactatgtcatccccacaggtacctatggccaaatgaataatggatcaacacccatgtttaatgacatcaacatttatgatctctttgtctggatgcattattatgtgtcaagggacacactgcttggagggtcygaaatctggaaagacattgattttgctcatgaagccccaggtttcctgccttggcacacactcttcttgttgctgtgggaacaagaaatccagaagctgaccggggatgagaacttcactattccatattgggattggcgagatgctaaaagctgtgacatttgcacagatgagtacatgggagggcgcaacccagcaaaccctaacttactcagcccagcatccttcttctcctcctggcaggtaagat

SEQ ID NO: 211588 - DNA, 723 bp, Canis familiaris; identical to SEQ ID NO: 1481

SEQ ID NO: 211589 - DNA, 445 bp, Canis familiaris; identical to SEQ ID NO: 1482
  misc_feature (26)..(27): n is a, c, g, or t
  misc_feature (36)..(36): n is a, c, g, or t

SEQ ID NO: 211590 - DNA, 1400 bp, Canis familiaris
aaaagccatcctcattgccagtaacatcaccaaaaccatgagccttaaaggaagccactaccgcgtgttcccgtacagtgtgttctatgtcttctacgaacagtacctgaccattattgatgacacgatctttaaccttagcgtgtcactgggagccatcttcttggtgaccttggttctcctgggctgtgaactgtggtctgcagtgatcatgtgtgtcaccattgccatgatcttggtcaacatgtttggcgtcatgtggctgtggggcatcagtctgaacgcggtttccttggtcaacctggtcatgagctgtggcatctccgtggagttctgcagccacataacgagagcgttcacagtgagtgcgaagggcagccgcgtggaacgggccgaagaggcgctctctcacatgggcagttctgtgttcagtggaatcacactaacgaaatttggagggattgtggtgttggcctttgccaaatcgcagattttccaggtttttattacaggcatgtacctggctatggtcttgctgggagccacgcacggcttgatattcctccctgtgttactcagctacataggcccatcaataaataaagccaaaagtttggcctcccaggagcgatacaaaggtacagagcgagagcagctcctgaacttctagcctctcgtgaggtttggggaccttgaactgtgtctgcgggtcggtcggtttaccactggacagtagctgctkcrtcagggcggagctggacaccagacagtaccagacaccaccagaacagctttcaacctcaggactgcaagatctgacgtgtgaarcagtattaccagaatcgggaaggcaactccaggacgctgaggggccttccggcttctccaggaacatagacccagggcaggcagaaggcgacactggcaaggctgagtgggatctgctccctgacacgtttttaaaggccacatcaatgcaatgtttttcttttgtttgtttgtttttggagtaagccatcacaacacaggttctataccatatttttagtaacatttgaggatattgtagatacactttactataacyttttgtagtttaaagagctttattaatgccataaattaactttgtacacatttttatatatataaaaaaaaacctagcaagggatttcagaatgttgtaggcctcattagagcttggtctcccaaaacctgtttgaaaaaggcaacatgttcttcacaatgttctcctataaaggaaatacagatttcatcagatgtgacgtgaaaagaggaaaacaagagaatgaacactttagggctcatagatctgtatggtgggttttaacttatttttctttcataaatactttgttttcctaaaaaaaaaaaaaaaa

SEQ ID NO: 211591 - DNA, 713 bp, Canis familiaris; identical to SEQ ID NO: 1484

SEQ ID NO: 211592 - DNA, 474 bp, Canis familiaris; identical to SEQ ID NO: 1485

SEQ ID NO: 211593 - DNA, 747 bp, Canis familiaris; identical to SEQ ID NO: 1486
  misc_feature (119)..(119): n is a, c, g, or t
  misc_feature (137)..(137): n is a, c, g, or t
  misc_feature (194)..(194): n is a, c, g, or t

SEQ ID NO: 211594 - DNA, 1007 bp, Canis familiaris; identical to SEQ ID NO: 1487

SEQ ID NO: 211595 - DNA, 682 bp, Canis familiaris; identical to SEQ ID NO: 1488

SEQ ID NO: 211596 - DNA, 690 bp, Canis familiaris; identical to SEQ ID NO: 1489

SEQ ID NO: 211597 - DNA, 1018 bp, Canis familiaris; identical to SEQ ID NO: 1490

SEQ ID NO: 211598 - DNA, 430 bp, Canis familiaris; identical to SEQ ID NO: 1491

SEQ ID NO: 211599 - DNA, 743 bp, Canis familiaris; identical to SEQ ID NO: 1492

SEQ ID NO: 211600 - DNA, 770 bp, Canis familiaris; identical to SEQ ID NO: 1493

SEQ ID NO: 211601 - DNA, 756 bp, Canis familiaris; identical to SEQ ID NO: 1494

SEQ ID NO: 211602 - DNA, 728 bp, Canis familiaris; identical to SEQ ID NO: 1495

SEQ ID NO: 211603 - DNA, 573 bp, Canis familiaris; identical to SEQ ID NO: 1496

SEQ ID NO: 211604 - DNA, 743 bp, Canis familiaris; identical to SEQ ID NO: 1497
  misc_feature (127)..(127): n is a, c, g, or t
  misc_feature (241)..(241): n is a, c, g, or t
  misc_feature (259)..(259): n is a, c, g, or t

SEQ ID NO: 211605 - DNA, 707 bp, Canis familiaris; identical to SEQ ID NO: 1498
  misc_feature (83)..(83): n is a, c, g, or t

SEQ ID NO: 211606 - DNA, 596 bp, Canis familiaris; identical to SEQ ID NO: 1499

SEQ ID NO: 211607 - DNA, 589 bp, Canis familiaris; identical to SEQ ID NO: 1500

SEQ ID NO: 211608 - DNA, 536 bp, Canis familiaris; identical to SEQ ID NO: 1501

SEQ ID NO: 211609 - DNA, 660 bp, Canis familiaris; identical to SEQ ID NO: 1502

SEQ ID NO: 211610 - DNA, 726 bp, Canis familiaris; identical to SEQ ID NO: 1503

SEQ ID NO: 211611 - DNA, 707 bp, Canis familiaris; identical to SEQ ID NO: 1504

SEQ ID NO: 211612 - DNA, 684 bp, Canis familiaris; identical to SEQ ID NO: 1505

SEQ ID NO: 211613 - DNA, 702 bp, Canis familiaris; identical to SEQ ID NO: 1506

SEQ ID NO: 211614 - DNA, 825 bp, Canis familiaris; identical to SEQ ID NO: 1507

SEQ ID NO: 211615 - DNA, 825 bp, Canis familiaris; identical to SEQ ID NO: 1508

SEQ ID NO: 211616 - DNA, 1004 bp, Canis familiaris; identical to SEQ ID NO: 1509

SEQ ID NO: 211617 - DNA, 843 bp, Canis familiaris; identical to SEQ ID NO: 1510

SEQ ID NO: 211618 - DNA, 889 bp, Canis familiaris; identical to SEQ ID NO: 1511

SEQ ID NO: 211619 - DNA, 776 bp, Canis familiaris; identical to SEQ ID NO: 1512

SEQ ID NO: 211620 - DNA, 754 bp, Canis familiaris; identical to SEQ ID NO: 1513

SEQ ID NO: 211621 - DNA, 741 bp, Canis familiaris; identical to SEQ ID NO: 1514

SEQ ID NO: 211622 - DNA, 367 bp, Canis familiaris; identical to SEQ ID NO: 1515
  misc_feature (329)..(329): n is a, c, g, or t

SEQ ID NO: 211623 - DNA, 734 bp, Canis familiaris; identical to SEQ ID NO: 1516

SEQ ID NO: 211624 - DNA, 463 bp, Canis familiaris; identical to SEQ ID NO: 1517

SEQ ID NO: 211625 - DNA, 452 bp, Canis familiaris; identical to SEQ ID NO: 1518

SEQ ID NO: 211626 - DNA, 775 bp, Canis familiaris; identical to SEQ ID NO: 1519

SEQ ID NO: 211627 - DNA, 479 bp, Canis familiaris; identical to SEQ ID NO: 1520

SEQ ID NO: 211628 - DNA, 600 bp, Canis familiaris
cttctcaatagtctgtaggctttggctctacgtaggatgagggtggctaggagtcagtggggcccaccaccctcacggccccctgcttctctcttctcacctgggtagtggaaacgtgctgggacgcaacagctttgargtacgcgtttgtgcctgtcccgggagagaccgccggactgaggaggagaatttccacaagaagggggagccttgtcctgagccaccccccgggagtaccaagcggtaagcaagcaagacaagaggaggtgaaggagggacacctgggtggctcaggggttgagcatcaggcatgatcccagggtcctgggatcgagtcccgtgtcagggtccctgtagggagcctgcctctccctctgcctatttttttgcctttgtgtgtatgtctcatgaataaataaatataatcttgaaaaaaaaaaaaaaagaggaggatgtggggcagatacagagggtgcaattctgctcaaaacatactcttctcttgtcttttcctcctctctttcccagcactgcctcccagcaccagctcctctcccccgcaaaagaagaagccactagatggagaatatttcacccttc

SEQ ID NO: 211629 - DNA, 600 bp, Canis familiaris
gacacagtgtggtggtgccttatgagccacccgaggttggctctgactataccaccatccactacaactacatgtgtaacagttcctgcatgggaggcatgaaccggcggcccatcctcactatcatcaccctggaagactccagtggaaacgtgctgggacgcaacagctttgaggtacgcgtttgtgcctgtcccgggagagaccgccggactgaggaggagaatttccacaagaagggggagccttgtcctgagccaccccccgggagtaccaagcgagcactgcctcccagcaccagctcctctcccccgcaaaagaagaagccactagatggagaatattycaccyttcagatccgtgggcgtgaacgctatgagatgttcaggaatctgaatgaagccttggagctgaaggatgcccagagtggaaaggagccagggggaagcagggctcactccagccacctgaaggcaaagaaggggcaatctacctctcgccataaaaaactgatgttcaagagagaagggcccgactcagactgacttcccctgcttcctgtcctcccccaacacgcacaccctcactctcgtcctcctt

SEQ ID NO: 211630 - DNA, 621 bp, Canis familiaris; identical to SEQ ID NO: 1523

SEQ ID NO: 211631 - DNA, 660 bp, Canis familiaris; identical to SEQ ID NO: 1524
  misc_feature (206)..(206): n is a, c, g, or t

SEQ ID NO: 211632 - DNA, 656 bp, Canis familiaris; identical to SEQ ID NO: 1525

SEQ ID NO: 211633 - DNA, 645 bp, Canis familiaris; identical to SEQ ID NO: 1526
  misc_feature (52)..(52): n is a, c, g, or t

SEQ ID NO: 211634 - DNA, 718 bp, Canis familiaris; identical to SEQ ID NO: 1527

SEQ ID NO: 211635 - DNA, 630 bp, Canis familiaris; identical to SEQ ID NO: 1528

SEQ ID NO: 211636 - DNA, 760 bp, Canis familiaris; identical to SEQ ID NO: 1529

SEQ ID NO: 211637 - DNA, 769 bp, Canis familiaris; identical to SEQ ID NO: 1530

SEQ ID NO: 211638 - DNA, 769 bp, Canis familiaris; identical to SEQ ID NO: 1531

SEQ ID NO: 211639 - DNA, 943 bp, Canis familiaris; identical to SEQ ID NO: 1532
  misc_feature (71)..(72): n is a, c, g, or t
  misc_feature (309)..(309): n is a, c, g, or t
  misc_feature (469)..(470): n is a, c, g, or t

SEQ ID NO: 211640 - DNA, 585 bp, Canis familiaris; identical to SEQ ID NO: 1533

SEQ ID NO: 211641 - DNA, 571 bp, Canis familiaris; identical to SEQ ID NO: 1534

SEQ ID NO: 211642 - DNA, 734 bp, Canis familiaris; identical to SEQ ID NO: 1535
  misc_feature (145)..(145): n is a, c, g, or t
  misc_feature (238)..(238): n is a, c, g, or t
  misc_feature (249)..(251): n is a, c, g, or t
  misc_feature (442)..(442): n is a, c, g, or t

SEQ ID NO: 211643 - DNA, 645 bp, Canis familiaris; identical to SEQ ID NO: 1536

SEQ ID NO: 211644 - DNA, 498 bp, Canis familiaris; identical to SEQ ID NO: 1537

SEQ ID NO: 211645 - DNA, 1400 bp, Canis familiaris
  misc_feature (754)..(754): n is a, c, g, or t
  misc_feature (914)..(914): n is a, c, g, or t
  misc_feature (918)..(918): n is a, c, g, or t
cccgtggacgttcaggcgaaactggccctgctggtcctcccggaaaccccggaccccctggccctccaggtccccctggccctggcatcgacatgtctgcctttgctggcctgggccagagagagaagggccccgaccccctgcagtacatgcgggctgaccaggcggccggcgacctgagacagcatgatgccgaggtggacgccacgctcaagtccctcaacaaccagattgagagcatccgcagccccgagggctcccgcaagaaccccgctcgtacctgccgggacctgaaactctgccaccctgaatggaagagcggagactactggattgaccccaaccagggctgcaccttggatgccatgaaggttttctgcaacatggagactggcgagacgtgcgtctaccccaacccagcgagcgttcccaagaagaactggtggagcagcaagagcaaggacaagaaacatatctggtttggagaaaccatcaatggtggcttccacwtcagstacggtgrwgacaacctggctcccaacactgccracgtccagatgaccttcctccgcckgctgtccaccgagggctctcagaatatcacctaccactgcaagaacagcattgcctacctggacgaagcagccggcaacctcaagaaggccctgctcatmcagggctccmawgabgkggaratcsggsytgaggscaacavcaggkycamawakasygttckgaaggatkgctgcwcgrnmcmcamcsgtaadtgggscmagactatgatcgaktaccggtcacagaagacytcgcgcctccccatcatkgacmttgcgcccatggacataggagggcccgagcaggaattwggtgtggacatcgggcctgyctgcttytygtrwwaacccgdwccchcnwacnwcacmdyccmttgccvatccagaggacccmagtactttccagtmccagtcactctagggctctgcactgaatggctgacctgacctgatgtccattcakcccacccgctcacagtgtggacttttctcccctctttytaagagacctgaactgggcagactgcmaratdraatctyggtgttctattwawwwawwrtcttcctgtaagaccyttgggtcgrggcmsaggcmggaaacthacyggtgtgagtcmaacgcccccygagtgactgtccccagcccaggcawgaagatctcccttcaggtgccgggcgcaggaactgcgtgtgtccwacachatggtgctattctgtgtcmaacmcctctgtatttyttaaaacatcmaytgatattaaamammmaaaaawwmwdrraaarhamvaaaaaaaaaaaarraaaaaaaaaaaaaaaraaaaaaaaaaaaaaaaaaaaaaaaaaaaaaa

SEQ ID NO: 211646 - DNA, 676 bp, Canis familiaris; identical to SEQ ID NO: 1539

SEQ ID NO: 211647 - DNA, 676 bp, Canis familiaris; identical to SEQ ID NO: 1540

SEQ ID NO: 211648 - DNA, 793 bp, Canis familiaris; identical to SEQ ID NO: 1541
  misc_feature (302)..(302): n is a, c, g, or t
  misc_feature (313)..(313): n is a, c, g, or t
  misc_feature (318)..(319): n is a, c, g, or t
  misc_feature (323)..(323): n is a, c, g, or t
  misc_feature (334)..(334): n is a, c, g, or t
  misc_feature (702)..(702): n is a, c, g, or t

SEQ ID NO: 211649 - DNA, 650 bp, Canis familiaris; identical to SEQ ID NO: 1542

SEQ ID NO: 211650 - DNA, 750 bp, Canis familiaris; identical to SEQ ID NO: 1543

SEQ ID NO: 211651 - DNA, 689 bp, Canis familiaris; identical to SEQ ID NO: 1544

SEQ ID NO: 211652 - DNA, 696 bp, Canis familiaris; identical to SEQ ID NO: 1545

SEQ ID NO: 211653 - DNA, 598 bp, Canis familiaris; identical to SEQ ID NO: 1546

SEQ ID NO: 211654 - DNA, 544 bp, Canis familiaris; identical to SEQ ID NO: 1547

SEQ ID NO: 211655 - DNA, 421 bp, Canis familiaris; identical to SEQ ID NO: 1548

SEQ ID NO: 211656 - DNA, 629 bp, Canis familiaris; identical to SEQ ID NO: 1549
  misc_feature (23)..(23): n is a, c, g, or t

SEQ ID NO: 211657 - DNA, 741 bp, Canis familiaris; identical to SEQ ID NO: 1550

SEQ ID NO: 211658 - DNA, 741 bp, Canis familiaris; identical to SEQ ID NO: 1551

SEQ ID NO: 211659 - DNA, 793 bp, Canis familiaris; identical to SEQ ID NO: 1552

SEQ ID NO: 211660 - DNA, 726 bp, Canis familiaris; identical to SEQ ID NO: 1553

SEQ ID NO: 211661 - DNA, 615 bp, Canis familiaris; identical to SEQ ID NO: 1554

SEQ ID NO: 211662 - DNA, 733 bp, Canis familiaris; identical to SEQ ID NO: 1555

SEQ ID NO: 211663 - DNA, 697 bp, Canis familiaris; identical to SEQ ID NO: 1556

SEQ ID NO: 211664 - DNA, 697 bp, Canis familiaris; identical to SEQ ID NO: 1557

SEQ ID NO: 211665 - DNA, 711 bp, Canis familiaris; identical to SEQ ID NO: 1558

SEQ ID NO: 211666 - DNA, 688 bp, Canis familiaris; identical to SEQ ID NO: 1559

SEQ ID NO: 211667 - DNA, 639 bp, Canis familiaris; identical to SEQ ID NO: 1560

SEQ ID NO: 211668 - DNA, 683 bp, Canis familiaris; identical to SEQ ID NO: 1561

SEQ ID NO: 211669 - DNA, 883 bp, Canis familiaris; identical to SEQ ID NO: 1562

SEQ ID NO: 211670 - DNA, 866 bp, Canis familiaris; identical to SEQ ID NO: 1563

SEQ ID NO: 211671 - DNA, 685 bp, Canis familiaris; identical to SEQ ID NO: 1564

SEQ ID NO: 211672 - DNA, 600 bp, Canis familiaris
aataggtagttaatggggtaattctgcttcttctatgtttctactatgtattcagtgacctagatttgtgctgggtcagagcattcagatatagtcagcttctctatcacactacatcttcctccttgtcagcctagctcagctttccctagaactttccactgctctacatcgtgctgacacagagatgcctaaaggcagctctagggtagtgcttttgtatggtttagtcaagctctgaaatcttgggcaaaaaggtgaggagagggcaaggagaggaaaggattcctctctccagaaggtcactccaatgttacttttgattcctagagggtaaatatgactcctttttctatcccaagccaaccaagagtgctcttggaggaaaagccagctcttccttgcctgttgtcaagtctcagctgatttgcagaatatgtcttttaaaaatgtttaagcctatttatttgagagtccttgtttttgctactaattatatagttcatcatatattaccattcacaccaaccatcgtggtcataacatctttgaaaagaaaaatatatatgcgcagtattttattaaaacaacattttattt

SEQ ID NO: 211673 - DNA, 470 bp, Canis familiaris; identical to SEQ ID NO: 1566

SEQ ID NO: 211674 - DNA, 422 bp, Canis familiaris; identical to SEQ ID NO: 1567

SEQ ID NO: 211675 - DNA, 825 bp, Canis familiaris; identical to SEQ ID NO: 1568
  misc_feature (529)..(529): n is a, c, g, or t
  misc_feature (534)..(534): n is a, c, g, or t

SEQ ID NO: 211676 - DNA, 744 bp, Canis familiaris; identical to SEQ ID NO: 1569

SEQ ID NO: 211677 - DNA, 669 bp, Canis familiaris; identical to SEQ ID NO: 1570

SEQ ID NO: 211678 - DNA, 851 bp, Canis familiaris; identical to SEQ ID NO: 1571
  misc_feature (627)..(627): n is a, c, g, or t

SEQ ID NO: 211679 - DNA, 726 bp, Canis familiaris; identical to SEQ ID NO: 1572

SEQ ID NO: 211680 - DNA, 600 bp, Canis familiaris
caaacgagagctgaggctaatgaaaaacagggaagctgcccgggagtgtcgcaggaagaagaaagaatatgtcaaatgtcttgaaaatcgtgtggctgtgcttgaaaaccaaaacaagactctcattgaggaactcaaagccctcaaagatctttattgccataaagcagagtaactgtctttgacttggaccttgtttactgtgaactctaatcaaggcaggagatgcagcaattctactaattgccatgtggacttgtggaagggacacttgtgacccttgagaatccagtgtggcttagtgtttgacattgaattgggtatgctgttccaagatttggaatgcagccatgatcagatttaccaagcttacttcagtctgcttgtcaatagcacgcaaaaaaaatgttttgtttgccctcttgcttctactttttttcagggaagctgctaaagaatgtcgacgtcgaaagaaagaatatgtaaaatgtctggagagtcgagttgcagtgctggaagttcagaacaagaagctcatagaggaactcgaaactttgaaagacatttgctctcctaaaacagattagtagaaatatttaa

SEQ ID NO: 211681 - DNA, 600 bp, Canis familiaris
aaaaaaaaaaaaaaaaaaaaaaaaggaaatcgtaagacagagaaaatacgtttacattactgtattgtatttattggaaaaaaacccacctgtaagtggaccagcacagttcaaacccatattgttcaagggtcatctgtaatgtcttgccttccctgatagatcacagctcctgtgtcttacaggtctcttccctgtacccaagacagcacctagcctgggccttgactacaacagctactgatgcacccactgattcaagttattttatacctaccacatgtcaaagaccagggatgcagcagatcccatgcctgcccttacactttatttttattctctgataggtaatagcgaagaaccatgcaatggcacattttctcacttagcatttttctcattcagtcctttcaactctttgagggtgtgtgtgtgtactactatcaaccccatttctggaagcaaaaagtgggatttagaaagtcaacagtgctggttgcagtggaacctgtcttagaccaggtctcctataattccaccgatctagaccttaattaaccattgtgatttactggcacggcagccgcggcaggtacactc

SEQ ID NO: 211682 - DNA, 791 bp, Canis familiaris; identical to SEQ ID NO: 1575
  misc_feature (402)..(402): n is a, c, g, or t
  misc_feature (515)..(515): n is a, c, g, or t

SEQ ID NO: 211683 - DNA, 430 bp, Canis familiaris; identical to SEQ ID NO: 1576

SEQ ID NO: 211684 - DNA, 800 bp, Canis familiaris; identical to SEQ ID NO: 1577

SEQ ID NO: 211685 - DNA, 800 bp, Canis familiaris; identical to SEQ ID NO: 1578

SEQ ID NO: 211686 - DNA, 744 bp, Canis familiaris; identical to SEQ ID NO: 1579

SEQ ID NO: 211687 - DNA, 732 bp, Canis familiaris; identical to SEQ ID NO: 1580

SEQ ID NO: 211688 - DNA, 696 bp, Canis familiaris; identical to SEQ ID NO: 1581

SEQ ID NO: 211689 - DNA, 687 bp, Canis familiaris; identical to SEQ ID NO: 1582

SEQ ID NO: 211690 - DNA, 555 bp, Canis familiaris; identical to SEQ ID NO: 1583

SEQ ID NO: 211691 - DNA, 752 bp, Canis familiaris; identical to SEQ ID NO: 1584
  misc_feature (116)..(116): n is a, c, g, or t
  misc_feature (194)..(194): n is a, c, g, or t
  misc_feature (201)..(201): n is a, c, g, or t
  misc_feature (210)..(210): n is a, c, g, or t

SEQ ID NO: 211692 - DNA, 747 bp, Canis familiaris; identical to SEQ ID NO: 1585

SEQ ID NO: 211693 - DNA, 701 bp, Canis familiaris; identical to SEQ ID NO: 1586

SEQ ID NO: 211694 - DNA, 690 bp, Canis familiaris; identical to SEQ ID NO: 1587

SEQ ID NO: 211695 - DNA, 670 bp, Canis familiaris; identical to SEQ ID NO: 1588

SEQ ID NO: 211696 - DNA, 697 bp, Canis familiaris; identical to SEQ ID NO: 1589
  misc_feature (14)..(14): n is a, c, g, or t
  misc_feature (504)..(505): n is a, c, g, or t
  misc_feature (515)..(516): n is a, c, g, or t
  misc_feature (523)..(524): n is a, c, g, or t
  misc_feature (526)..(526): n is a, c, g, or t
  misc_feature (534)..(535): n is a, c, g, or t
  misc_feature (547)..(548): n is a, c, g, or t

SEQ ID NO: 211697 - DNA, 737 bp, Canis familiaris; identical to SEQ ID NO: 1590

SEQ ID NO: 211698 - DNA, 621 bp, Canis familiaris; identical to SEQ ID NO: 1591

SEQ ID NO: 211699 - DNA, 891 bp, Canis familiaris; identical to SEQ ID NO: 1592

SEQ ID NO: 211700 - DNA, 819 bp, Canis familiaris; identical to SEQ ID NO: 1593

SEQ ID NO: 211701 - DNA, 518 bp, Canis familiaris; identical to SEQ ID NO: 1594

SEQ ID NO: 211702 - DNA, 1400 bp, Canis familiaris
ggttcgcctgcgcactgtgggcgccgcagtttttgaaacatgaatccttcactcttcttgactgccctttgcttgggaatagcctcagcagctcccaaatttgatcaaagcttaaatgcacagtggtaccagtggaaggcaacgcacaggagattatatggcatgaatgaagaaggatggaggagagcagtgtgggagaagaatatgaaaatgattgaactgcataatcgggaatacagccaagggaaacatggcttcacaatggcaatgaatgcctttggtgacatgaccaatgaagaattcaggcaggtgatgaatggctttcaaaaccagaagcacaagaaagggaaaatgttccaagaacctctctttgctgagatccccaaatcagtggactggagagagaaaggctatgtaactcctgtgaagaatcagggtcagtgtggttcttgttgggcttttagtgcaactggtgcccttgaaggacagatgttccggaaaacgggcaaacttgtgtcactgagtgagcaaaacctggtggactgctctagggctcaaggtaacgagggctgcaatggtggcctgatggataacgccttccggtatgttaaggacaatggaggcctggactcagaggaatcttatccgtatcttggaagggacacagagacctgcaattacaagcctgagtgttctgctgccaatgacactggctttgtggacctccctcaacgggagaaggccctaatgaaagcagtggcaactctagggcccatctctgttgctattgatgcaggccatcagtctttccaattctacaaatcaggcatttattttgatccagactgcagcagcmaagatctagatcatggtgttytggtggttggctatggctttgaaggaacagattcmaataataaattttggattgtcaagaacmgttggggtccagaatggggctggaatggctatgtaaaaatggccmargaccagaacaaccactgtggaattgccacagcagccagctatcccmctgtgtgagctgatggatcgcaagattagaggacttgaaggcagcatatctggargaattttatcttaaagctgaccagactcttattgtrtaagataagacacttgaatcattgaggatccmagttgtgatttgaattctgtgacactttttatcagggtaaaacattaccmctactttaattactgttatatatggctttataacgttgaagactcattacttaattctaagacttttgacttctcattttttcaaaagatatataaaactttgcccytttgaaataaattttaattccaatatgtwaaaaaaaaaaaaaaaaaaaaaaaaaaaaaaaaaaaaaaaaaaaaaaaaaaaaaaaaaa

SEQ ID NO: 211703 - DNA, 706 bp, Canis familiaris; identical to SEQ ID NO: 1596

SEQ ID NO: 211704 - DNA, 702 bp, Canis familiaris; identical to SEQ ID NO: 1597

SEQ ID NO: 211705 - DNA, 689 bp, Canis familiaris; identical to SEQ ID NO: 1598

SEQ ID NO: 211706 - DNA, 440 bp, Canis familiaris; identical to SEQ ID NO: 1599

SEQ ID NO: 211707 - DNA, 698 bp, Canis familiaris; identical to SEQ ID NO: 1600

SEQ ID NO: 211708 - DNA, 1400 bp, Canis familiaris
gcagcgctcgggtagggaaccgactgaatactctgtgttttcctgtcctgttggggggtttcctagggagcacgctgtcctgccttgttaacgggaggtgccgtccatacgcggttactctcccacactggagctgtgtactcacactcactgtgcagcaaacacttgggaaaatgaaggccagagtttcgccttggtgattctggtgacggggactgattcccagccgtcacaggacagagcggaaggcccctgctgaggacagacctccagcaagtcaggtggtccagtgacccctcacctcatggcttgtctcctgaccctgacctgggcggtcagtcagaattctgcagactcactctgcaccaggactgggagcttcctcgaggatctcctggcccagccctgtgcccggcctctcacatgatgttttcttcccacaggaggaaaaggaccaggctactctcatgctgcacgtgagtatgtagggagtgatccctgagaccccgggggagtgtagacaggaccccatggggagctcacccccacagcttctcctttagtctcacctcctgtgagctctgaccacgtcctgtttattctcctctaggcgatgacagtgcccagggctctgatgtgtctctgacagctcctagaggtgagaccccagagaccttgaagtggggagggttggggccttggggacctgatgagtgcgagggggactgttgagaatgtcagcacttatgtgactgacctcagtttgtacttgattgtttttcagtgtgagaccagctgcctgtgggactgagcgatgcaagatgtgttcacatctcacgtgatgacatcaacaaccctggcttgtctctgcaaacagtgtcaggatgtgcctgtgtccctaggagcataatgtgaggaggtggggagattggcccaccctgcccaccatgacctgtccctaatctgatgtgcgctctcttctctgatgtgctttcctgtccagcagagggagggctggaccatctccatccctgtctttgtttcatgttgggctgagtgtagtgccttacttttctattcaaaatgagaatccagggtagccctggttgctctgtggtttagcgccaccttgagcccagggcctgatcctggggacccggatggagtcccatatctggctccctgcatggaacctgcttctccctctgcctgtctctcatgaataaataaataaaatcttaaaaaaaaaacaaaatgagaatccagatatattttctaattcatggcacgtgaggctgatgaagtaataaaagtgaaatttgtaaggttgagacagaaatgaatggatattgaatgcaccatcctaaaggaaatggtagctaggtgacatgatgcacgtg

SEQ ID NO: 211709 - DNA, 706 bp, Canis familiaris; identical to SEQ ID NO: 1602

SEQ ID NO: 211710 - DNA, 1400 bp, Canis familiaris
cttctggagaatttcagcagagtcaggactcaagccagaggctggaccctcatcctccctcccctttccagagccttcccctctgtccaccattgtcatcgtcagcattgctgctctggttctcctcgtggtctctggggtgattggagctgtgatctggaggaagcagcgctcgggtagggaaccgactgaatactctgtgttttcctgtcctgttggggggtttcctagggagcacgctgtcctgccttgttaacgggaggtgccgtccatacgcagttactctcccacactggagctgtgtactcacactcactgtgcagcaaacacttgggaaaatgaaggccagagtttcgccttggtgattctggtgacggggactgattcccagccgtcacaggacagagcggaaggcccctgctgaggacagacctccagcaagtcaggtggtccagtgacccctcacctcatggcttgtctcctgaccctgacctgggcggtcagtcagaattctgcagactcactctgcaccaggactgggagcttcctcgaggatctcctggcccagccctgtgcctggcctctcacatgatgttttcttcccacaggaggaaaaggaccaggctactctcatgctgcacgtgagtatgtagggagtgatccctgagaccccgggggagtgtagacaggacccaatggggagctcacccccacagctgctcctttagtctcacctcctgtgagctctgaccacgtcctgtttattctcctctaggtgatgacagtgcccagggctctgatgtgtctctgacagctcctagaggtgagaccccagagaccctgaagtggggagggttggggcactggggaccagatgagtgcgagggggctgttgagaatgtcagcacttatgtgaccgacctcaatttgtacttgattttttctcacagtgtgagaccagctgcctatgggactgagcgatgcaagatgtgttcacatctcacgtgatgacatcaacaaccctggcttgtctctgcaaacagtgtcaggatgtgcctgtgtccctaggagcataatgtgaggaggtggggagattggcccaccctgcccaccatgacctgtccctaatctgatgtgcgctctcctctctgatgtgctttcctgtccaggagaggcagggctggaccatctccatccctgtctttgtttcatgttgagtactaatctcttactatccgattgaaaataagaatccagatatgagtttgtgtttcctgagtcttgggatgtgaggctgatgaggtaataaaaggagatttgtgaagttgagagagcaaataaatggaagccctgagaaccttccagaactctcatgtttgctgtgttgagtctgttgaagt

SEQ ID NO: 211711 - DNA, 714 bp, Canis familiaris; identical to SEQ ID NO: 1604

SEQ ID NO: 211712 - DNA, 1400 bp, Canis familiaris
cgcagttcgtgcggttcgacagcgacgcggccactgggaggatggagccgcgggcgccgtgggtggagcaggaggggccggagtattgggaccggcagacgcggaccatcaaggagaccgcacggactttccgagtggacctggacaccctgcgcggctactacaaccagagcgaggccgggtctcacaccmkccagaccatgtacggctgtgacctggggcccgrcgggcgcctyctccgcgggtacagkcaggwcgcctacgacggcgccgattacatckccctgaacgaggacctgcgctcctggaccgcggcggacrcggcggcgcagatcacycrgcgcaagtgggargcggcaggtgtagcagagctacaatggaggaactacctggagacgacgtgcgtggagtggctgcrgaggtacctggagatggggaaggagacgctgctgcgcgcagaccccccaagcacacgtgtgacccaccaccccgtctctgaccatgaggtcaccctgaggtgctgggcgctgggcttctaccctgcggagatcaccctgacctggcagcgggatggggaggaccagacccaggacacagaggttgtggacacaaggcctgcaggagatgggaccttccagaagtgggcggccgtggtggtgccttctggacaggagcagagatacacgtgccacgtccagcatgaggggctgccggagcctrtcacscggagatgggasmyttcccctctgtccaccatkgtcatcgtcagcattgctgctctggttctcctcgtggtckctggggtgattggagctgtgatctggaggaagcagcgctcrggaggwaaaggaccaggctactctcatgctgcacgygatgacmgtgcccagggctctgatgtgtctctgacrgctcctagagtgtgagaccagctgccctgtggggactgassgatgcmagatgtgttcacatctcacgtgatgacatcaacaaycctggcttgtctctgcmaacagtgtcaggatgtgcctgtgtccctaggagcataatgtgaggaggtggggagattggcccaccctgcccaccatgacctgtccctaatctgatgtgcgctctcytctctgatgtgctttcctgtccagsagaggcagggctggaccatctccatccctgtctttgtttcatgttgagtactaatcwcttactayccgattgaaaataagaatccagatatgagtttgtgtttcctgagtcttgggatgtggggctgatgaggtaataaaaggagatttgtgaagttgagagagcaaataaatggaagccctgagaaccttcmaraamwmwmaaaaaaaaaaaaaaaaaaaaaaaaaaaaaaaaaaaaaaaaaaaaaaaaaaaaaaa

SEQ ID NO: 211713 - DNA, 600 bp, Canis familiaris
ctcgtagtttgtttcccagagttaagagacgcttatggtttgtctccctctctgatttcatcttatttcatttttccttccattcacctgtgtttatgttttgtttcttaaattccacatatgagtgaaatcatatgatatttgtctttctctgatggacttatttcacttagcataatactctctagttcatccacataattgcaaatggcaagatttcattctttttgatggctaagtaatattccatcgtatatatgtaccacattttcattatccattcgtctgttatggtcatctgggctctttaaatagtttggctgttgtggacattgctgctataaatattggggtgcatgtaccccttggaatcattatgtctgtattctttggataaatacctagtagtgcaattgctgggtagtagggtagttctagttctacctttcttaactggatttttgttttatgagtttgataagtttctttagctcttggatactaaccctttgtctgatatgtcatttgcaaatatcttctcccatttctgtaggttgccttttagttttgttgattgttttctttgctgtgcaaaagctt

SEQ ID NO: 211714 - DNA, 544 bp, Canis familiaris; identical to SEQ ID NO: 1607

SEQ ID NO: 211715 - DNA, 654 bp, Canis familiaris; identical to SEQ ID NO: 1608

SEQ ID NO: 211716 - DNA, 419 bp, Canis familiaris; identical to SEQ ID NO: 1609

SEQ ID NO: 211717 - DNA, 706 bp, Canis familiaris; identical to SEQ ID NO: 1610

SEQ ID NO: 211718 - DNA, 629 bp, Canis familiaris; identical to SEQ ID NO: 1611

SEQ ID NO: 211719 - DNA, 600 bp, Canis familiaris
aattactggtacctgcagcagagggagaagacagcctgaagaagatgcagctgatggagcttgcaattctgaatggcacctacagagatgccaacattaaatcaccagcccttgccttttctcttgcagcaacagcccaggctgctccaaggattatcactgggcctgcgcctgttctcccaccagctgccctgcgtactcctacgccagctggccctaccataatgcctttgatcagacaaatacagaccgctgtcatgccaaacggaactcctcacccgactgctgcaatagttcctccggggcccgaagctggtttgatctacacaccctatgagtacccctacacgttggcaccagcgacatccatccttgagtatcctattgaacctagtggtgtattaggtgcggtggctactaaagttcgaaggcacgatatgcgtgtccatccttaccaaaggattgtgaccgcagaccgagccgccaccggcaactaacctatgaccttctgacctctgaactcttcacccaatgatgacctgaccatgcctgcctgctgatcagttaactggtaatcgcctttgcttgcctgtcgtcagt

SEQ ID NO: 211720 - DNA, 425 bp, Canis familiaris; identical to SEQ ID NO: 1613

SEQ ID NO: 211721 - DNA, 600 bp, Canis familiaris
gcagcagctagtttaggaagcaggatctccgctggtgtaatgacgggaggagcagcagtgttcatagggcaacccactgaggtcgtgaaggtgagacttcaagcacaragccatctgcayggccgcaaacctcggtacaccggcacttacaatgcctacagaatcatagccaccacggagggcctgacgggcctttggaaagggactactcccaacctgatgagaaatgtcatcatcaattgtacggagctagtcacgtatgacctaatgaaggaggcccttgtgaaaaaccatctactagcagacgacctaccytgccacttcctatcagctcttgttgctggattttgcacaaccgttctctcctctccggtggatgtggtaaaaaccagatttgttaattctgtaccagaacagtacacaagtgtgcccaactgtgcaatgacaatgctcaccaaggaaggaccattggcttttttcaaaggatttgtaccttccttcttgagactcggatcctggaacgtcattatgtttgtgtgctttgaacagctgaagcgagaactgatgaagtcagggcggaccgtggactgtgccacataa

SEQ ID NO: 211722 - DNA, 767 bp, Canis familiaris; identical to SEQ ID NO: 1615
  misc_feature (217)..(217): n is a, c, g, or t

SEQ ID NO: 211723 - DNA, 559 bp, Canis familiaris; identical to SEQ ID NO: 1616

SEQ ID NO: 211724 - DNA, 600 bp, Canis familiaris
  misc_feature (485)..(485): n is a, c, g, or t
  misc_feature (575)..(575): n is a, c, g, or t
cggcgctcgtccccccttcccgggcccgccgctcagagccagccctcggccacctccacgcagcgctctcggaccgccccgaggcctccgccgccgccgccccagcgccgcgcagccgccgccgccgccgcctcctcagcctccgccatgacgaccgcgtccccctcgcaggtgcgccagaactaccaccaggactccgaggccgccatcaaccgccagatcaacctggagctctacgcgtcttacgtctacttgtccatgtcttattactttgatcgcgatgatgtggctttgaagaactttgccaaatattttctccaccaatctcatgaggagagggaacatgctgagaaactgatgaagctgcagaaccaacgaggtggtcgaatctttcttcaggatattaagaaacmagaccgtgacgattgggagaatgggctgratgcaatggagtgtgcattacacttgggaaaagagcgtgaatnagtcaytactggaactgcacaaactggscacttgataaaaatgaccccmcttgtgkgactyattgagaaytattactgacgagcaggtgnaatcatcaaaaaatggtgacattac

SEQ ID NO: 211725 - DNA, 768 bp, Canis familiaris; identical to SEQ ID NO: 1618
  misc_feature (102)..(102): n is a, c, g, or t
  misc_feature (166)..(166): n is a, c, g, or t
  misc_feature (256)..(256): n is a, c, g, or t
  misc_feature (362)..(362): n is a, c, g, or t
  misc_feature (697)..(697): n is a, c, g, or t

SEQ ID NO: 211726 - DNA, 749 bp, Canis familiaris; identical to SEQ ID NO: 1619

SEQ ID NO: 211727 - DNA, 696 bp, Canis familiaris; identical to SEQ ID NO: 1620

SEQ ID NO: 211728 - DNA, 653 bp, Canis familiaris; identical to SEQ ID NO: 1621

SEQ ID NO: 211729 - DNA, 642 bp, Canis familiaris; identical to SEQ ID NO: 1622

SEQ ID NO: 211730 - DNA, 623 bp, Canis familiaris; identical to SEQ ID NO: 1623

SEQ ID NO: 211731 - DNA, 644 bp, Canis familiaris; identical to SEQ ID NO: 1624

SEQ ID NO: 211732 - DNA, 648 bp, Canis familiaris; identical to SEQ ID NO: 1625

SEQ ID NO: 211733 - DNA, 600 bp, Canis familiaris
aacaactctgtcaatccagaacttttggaaagcctctcctggcctctgtttagaatgggccctgtggaacttcccagctggaaatctctgacctccagaaactgatgacttggccttggggtggggaggcggaggttgggaggggcaacccttaccaagtgagttttcaccatcctcttgtctctctcttcctgagaagagttttctaaaccccacccctgaattttaccactacctcagcagctgaagtacccagcagcctgctctcagctgccctcggagtccccattagctttggtggcccacctgtcaccttgctcacttctgtgctgcgtgcttagggcaaagaggtctctcctccttctattctttctgctgcctgtggacctgatggaccactgagtgtccttcaggctcggtgggcaaggctgggagcagaaagctataaaaggtccgggtttggggttctgtccctgactccatcactacagattcctaagcaccagccttcccccctttggatacaggacagctctgatctacctcacagcagtgtcaggaggacttctccagggtttgaggagggtggagggtgaattc

SEQ ID NO: 211734 - DNA, 600 bp, Canis familiaris
ataataattgtgcagtttggtggaaaacctttcagttgttcagaactttcaatagaacagtggctatggtcaatattcctaggaatggggacattactctggggccagcttatttcaacaattccaactagccgtttaaaattcctaaaagaagctggccatggaacacaaaaggaagaaatcccagcggaggagctcgcagaggatgtggaagagattgaccatgctgaaagggaactgcggcgtggccagatcttrtggtttagaggtctgaacagaatccaaactcagattcgagtggtgaatgcatttcgtagttctttatatgaagggttagaaaaaccggaatcaagaagttcgattcacaactttatgacacatcctgagtttaggatagargattcagagcctcatatccccctaattgatgacactgatgcygaagatgatgctcctacaaaacgtaactccagtcctccaccctctcccaacaaaaataacaatgctgttgacagcgggattcaccttacaatagaaatgaacaagtctgctacctcttcatccccaggaagcccactacatagtttggaaacatcactc

SEQ ID NO: 211735 - DNA, 624 bp, Canis familiaris; identical to SEQ ID NO: 1628

SEQ ID NO: 211736 - DNA, 1400 bp, Canis familiaris
gtgatatcccaccagagcctggactcaggctcctccttgctgccagctccccctggaaatgaggatacattgggtgatgtctcaagctgcgctccccatgtgctcagccttcagggctagtgacagtggggagggggcaaggagggagggaaggcctgggggacacgaccccaagaagagcgggaacaggacaagagggaggaggctctctacataatccatcagcacagagcggccagtggccgatgaataaatgtatagagagaagaggtgggggcggagggagagagggagagagggaagggaccagggtataaagagggcccgcaagaaccgattccaggatcccagcagccagctccccaaagcgctcagggtcctgtggacggctcaccccggctgcgatggctgcaagtaagtccccctgggctcggtggtggaccgaggggcgaggtggaggggggcctgcagatggctgggggtgccacccccgggctctggggctggctgaggtgtgagcatagacasstacgcccggacgtgtggcccagtgctagaggttctgggtccctgcggggttggggcagggctggcaggaaccaggcctcttgcccgccgtccgtgcccctmygkstgyaggcccycggamctctgtgctcctggccttcgccttgctctgcctgccctggcctcaggaggtgggcgccttcccggccatgcccttgtccagcctgtttgccaacgccgtgctccgggcccagcacctgcaccaactggctgccgacacctacaaagagtttgagcgggcgtacatccccgagggacagaggtactccatccagaacgcgcaggccgccttctgcttctcggagaccatcccggcccccacgggcaaggacgaggcccagcagcgatccgacgtggagctgctccgcttctccctgctgctcatccagtcgtggctcgggcccgtgcagtttctcagcagggtcttcaccaacagcctggtgttcggcacctcagaccgagtctacgagaagctcaaggacctggaggaaggcatccaagccctgatgcgggagctggaagatggcagtccccgggccgggcagatcctgaagcagacctacgacaagtttgacacgaacctgcgcagtgacgatgcgctgcttaagaactacgggctgctctcctgcttcaagaaagacctgcataaggccgagacgtacctgcgggtcatgaagtgtcgccgcttcgtggaaagcagctgtgccttctagttgctgggcatctctgtcaccccctccccagagcctccccaaccctggggagtgccgctccagggtccactgtgctttcctaataaagttaagttgcatcataaaaaaaaaaaaaaaaaa

SEQ ID NO: 211737 - DNA, 600 bp, Canis familiaris
caggctgcgcctatggcaggaggagagcacaaaccccacgaagtggtgaagttcatggacgtctaccagcgcagctactgccgtcccattgagaccctggtggacatcttccaggagtaccctgacgagatcgagtacatcttcaagccatcctgcgtgcccctgatgcggtgtgggggctgctgtaatgatgagggcctagagtgcgtgcccactgaggagttcaacatcaccatgcagattatgcggatcaaacctcatcaaggccagcacataggggagatgagtttcctgcagcatagcaaatgtgaatgcagaccaaagaaagatagagcaaggcaagaaaaaaaatcarttcgaggaaaggggaaggggcaaaaamgaaagcgcaagaaatcccggtataarycctggagcgttccctgtgggccttgctcagagcggagaaagcatttgtttgtacaagatccgcagacgtgtaaatgttcctgcaaaaacacagactcgcgttgcaaggcgaggcagcttgagttaaacgaacgtacttgcagatgtgacaagccsaggcggtgagccgggctggaagaaggaggctccctc

SEQ ID NO: 211738 - DNA, 600 bp, Canis familiaris
aggatatgtcatccccaagggcacagtggtaattcccacactggactccgtcttgtttgacaaacaagaattccctgatccagagaagttcaagccagagcactttctgaatgaaaacggaaaattcaaatatagtgactacttcaaggcattctccgcaggaaagcgggtgtgtgttggagaaggcctggctcgcatggagctcttcctgttcttgtccgccattttgcagcactttaacctgaagtctctcgtcgaccccaaggatattgacctcagtccctgcacaatcgggtttgccaagatccccccccatyacaaactctgtgtcgttccccgctcgggctgaagacccccgggccccaggctctttggtgcaaacctggagtcttcctgcttccgcatatccctttaatgcctccaggaagaccctccctgcacagtctggtggaggcactcagggtttcacagggaataaattggtcctgagatgctgcttttcagagtcacactcatcagatgaaatttgacagcaacgtccaaaaaagattgtgcaaaactaattaaacaaattgaaacaaamaaaaaaaaaaaaaaaaa

SEQ ID NO: 211739 - DNA, 651 bp, Canis familiaris; identical to SEQ ID NO: 1632

SEQ ID NO: 211740 - DNA, 504 bp, Canis familiaris; identical to SEQ ID NO: 1633

SEQ ID NO: 211741 - DNA, 504 bp, Canis familiaris; identical to SEQ ID NO: 1634

SEQ ID NO: 211742 - DNA, 699 bp, Canis familiaris; identical to SEQ ID NO: 1635

SEQ ID NO: 211743 - DNA, 686 bp, Canis familiaris; identical to SEQ ID NO: 1636

SEQ ID NO: 211744 - DNA, 686 bp, Canis familiaris; identical to SEQ ID NO: 1637

SEQ ID NO: 211745 - DNA, 644 bp, Canis familiaris; identical to SEQ ID NO: 1638

SEQ ID NO: 211746 - DNA, 644 bp, Canis familiaris; identical to SEQ ID NO: 1639

SEQ ID NO: 211747 - DNA, 616 bp, Canis familiaris; identical to SEQ ID NO: 1640

SEQ ID NO: 211748 - DNA, 616 bp, Canis familiaris; identical to SEQ ID NO: 1641

SEQ ID NO: 211749 - DNA, 412 bp, Canis familiaris; identical to SEQ ID NO: 1642

SEQ ID NO: 211750 - DNA, 665 bp, Canis familiaris; identical to SEQ ID NO: 1643

SEQ ID NO: 211751 - DNA, 665 bp, Canis familiaris; identical to SEQ ID NO: 1644

SEQ ID NO: 211752 - DNA, 434 bp, Canis familiaris; identical to SEQ ID NO: 1645

SEQ ID NO: 211753 - DNA, 434 bp, Canis familiaris; identical to SEQ ID NO: 1646

SEQ ID NO: 211754 - DNA, 698 bp, Canis familiaris; identical to SEQ ID NO: 1647

SEQ ID NO: 211755 - DNA, 737 bp, Canis familiaris; identical to SEQ ID NO: 1648
  misc_feature (257)..(257): n is a, c, g, or t

SEQ ID NO: 211756 - DNA, 701 bp, Canis familiaris; identical to SEQ ID NO: 1649

SEQ ID NO: 211757 - DNA, 649 bp, Canis familiaris; identical to SEQ ID NO: 1650

SEQ ID NO: 211758 - DNA, 600 bp, Canis familiaris
tctatgatgaaccctattgtctatgcttataaaataaagaagttcaaggaaacctatcttttgatcttcaagacctatatgatctgccagtcctctgattctttggactcaagcactgagtagacttctgagtagttgtccttgaaagatgattcttcacccccattaacctccagattcaacatcagtaaacacttgaggacctatttgcctgagccaagggctttcacatccttaatttcttctactgaggtggggagcatttgactggttgcctccaattgtatctcccctaacacccttcctgtaatccaattattttcttgtccttcttctctgattcactgttctggatgtctgacttgaggaaaatgtcctgctgttactactgtttgtgttcctccttcccaagcaagaggagaagttatggaatccgaaggaggccttgttgactcagagatgaaaagtcccagtcctgcgggacatgagtgtggtggcgactctgttccactccattgcagaatcacaccaagaaacctaccccagcagatgtcagggagatggtaggaacagtgtcacaaagggagacttaaactgctg

SEQ ID NO: 211759 - DNA, 738 bp, Canis familiaris; identical to SEQ ID NO: 1652

SEQ ID NO: 211760 - DNA, 738 bp, Canis familiaris; identical to SEQ ID NO: 1653

SEQ ID NO: 211761 - DNA, 743 bp, Canis familiaris; identical to SEQ ID NO: 1654

SEQ ID NO: 211762 - DNA, 658 bp, Canis familiaris; identical to SEQ ID NO: 1655

SEQ ID NO: 211763 - DNA, 660 bp, Canis familiaris; identical to SEQ ID NO: 1656

SEQ ID NO: 211764 - DNA, 768 bp, Canis familiaris; identical to SEQ ID NO: 1657
  misc_feature (600)..(601): n is a, c, g, or t

SEQ ID NO: 211765 - DNA, 748 bp, Canis familiaris; identical to SEQ ID NO: 1658

SEQ ID NO: 211766 - DNA, 670 bp, Canis familiaris; identical to SEQ ID NO: 1659

SEQ ID NO: 211767 - DNA, 670 bp, Canis familiaris; identical to SEQ ID NO: 1660

SEQ ID NO: 211768 - DNA, 680 bp, Canis familiaris; identical to SEQ ID NO: 1661

SEQ ID NO: 211769 - DNA, 672 bp, Canis familiaris; identical to SEQ ID NO: 1662

SEQ ID NO: 211770 - DNA, 719 bp, Canis familiaris; identical to SEQ ID NO: 1663

SEQ ID NO: 211771 - DNA, 713 bp, Canis familiaris; identical to SEQ ID NO: 1664

SEQ ID NO: 211772 - DNA, 673 bp, Canis familiaris; identical to SEQ ID NO: 1665

SEQ ID NO: 211773 - DNA, 900 bp, Canis familiaris; identical to SEQ ID NO: 1666

SEQ ID NO: 211774 - DNA, 629 bp, Canis familiaris; identical to SEQ ID NO: 1667

SEQ ID NO: 211775 - DNA, 702 bp, Canis familiaris; identical to SEQ ID NO: 1668

SEQ ID NO: 211776 - DNA, 702 bp, Canis familiaris; identical to SEQ ID NO: 1669

SEQ ID NO: 211777 - DNA, 678 bp, Canis familiaris; identical to SEQ ID NO: 1670
  misc_feature (281)..(281): n is a, c, g, or t

SEQ ID NO: 211778 - DNA, 678 bp, Canis familiaris; identical to SEQ ID NO: 1671
  misc_feature (281)..(281): n is a, c, g, or t

SEQ ID NO: 211779 - DNA, 675 bp, Canis familiaris; identical to SEQ ID NO: 1672

SEQ ID NO: 211780 - DNA, 675 bp, Canis familiaris; identical to SEQ ID NO: 1673

SEQ ID NO: 211781 - DNA, 653 bp, Canis familiaris; identical to SEQ ID NO: 1674

SEQ ID NO: 211782 - DNA, 722 bp, Canis familiaris; identical to SEQ ID NO: 1675

SEQ ID NO: 211783 - DNA, 651 bp, Canis familiaris; identical to SEQ ID NO: 1676

SEQ ID NO: 211784 - DNA, 607 bp, Canis familiaris; identical to SEQ ID NO: 1677

SEQ ID NO: 211785 - DNA, 632 bp, Canis familiaris; identical to SEQ ID NO: 1678

SEQ ID NO: 211786 - DNA, 588 bp, Canis familiaris; identical to SEQ ID NO: 1679

SEQ ID NO: 211787 - DNA, 595 bp, Canis familiaris; identical to SEQ ID NO: 1680

SEQ ID NO: 211788 - DNA, 627 bp, Canis familiaris; identical to SEQ ID NO: 1681

SEQ ID NO: 211789 - DNA, 589 bp, Canis familiaris; identical to SEQ ID NO: 1682

SEQ ID NO: 211790 - DNA, 681 bp, Canis familiaris; identical to SEQ ID NO: 1683

SEQ ID NO: 211791 - DNA, 676 bp, Canis familiaris; identical to SEQ ID NO: 1684

SEQ ID NO: 211792 - DNA, 652 bp, Canis familiaris; identical to SEQ ID NO: 1685

SEQ ID NO: 211793 - DNA, 719 bp, Canis familiaris; identical to SEQ ID NO: 1686
  misc_feature (112)..(112): n is a, c, g, or t
  misc_feature (166)..(166): n is a, c, g, or t

SEQ ID NO: 211794 - DNA, 632 bp, Canis familiaris; identical to SEQ ID NO: 1687

SEQ ID NO: 211795 - DNA, 402 bp, Canis familiaris; identical to SEQ ID NO: 1688

SEQ ID NO: 211796 - DNA, 691 bp, Canis familiaris; identical to SEQ ID NO: 1689

SEQ ID NO: 211797 - DNA, 671 bp, Canis familiaris; identical to SEQ ID NO: 1690

SEQ ID NO: 211798 - DNA, 683 bp, Canis familiaris; identical to SEQ ID NO: 1691

SEQ ID NO: 211799 - DNA, 604 bp, Canis familiaris; identical to SEQ ID NO: 1692

SEQ ID NO: 211800 - DNA, 1154 bp, Canis familiaris; identical to SEQ ID NO: 1693

SEQ ID NO: 211801 - DNA, 626 bp, Canis familiaris; identical to SEQ ID NO: 1694

SEQ ID NO: 211802 - DNA, 596 bp, Canis familiaris; identical to SEQ ID NO: 1695

SEQ ID NO: 211803 - DNA, 509 bp, Canis familiaris; identical to SEQ ID NO: 1696

SEQ ID NO: 211804 - DNA, 1041 bp, Canis familiaris; identical to SEQ ID NO: 1697

SEQ ID NO: 211805 - DNA, 345 bp, Canis familiaris; identical to SEQ ID NO: 1698

SEQ ID NO: 211806 - DNA, 346 bp, Canis familiaris; identical to SEQ ID NO: 1699

SEQ ID NO: 211807 - DNA, 335 bp, Canis familiaris; identical to SEQ ID NO: 1700

SEQ ID NO: 211808 - DNA, 678 bp, Canis familiaris; identical to SEQ ID NO: 1701

SEQ ID NO: 211809 - DNA, 685 bp, Canis familiaris; identical to SEQ ID NO: 1702

SEQ ID NO: 211810 - DNA, 677 bp, Canis familiaris; identical to SEQ ID NO: 1703

SEQ ID NO: 211811 - DNA, 671 bp, Canis familiaris; identical to SEQ ID NO: 1704

SEQ ID NO: 211812 - DNA, 755 bp, Canis familiaris; identical to SEQ ID NO: 1705

SEQ ID NO: 211813 - DNA, 723 bp, Canis familiaris; identical to SEQ ID NO: 1706

SEQ ID NO: 211814 - DNA, 670 bp, Canis familiaris; identical to SEQ ID NO: 1707

SEQ ID NO: 211815 - DNA, 586 bp, Canis familiaris; identical to SEQ ID NO: 1708

SEQ ID NO: 211816 - DNA, 564 bp, Canis familiaris; identical to SEQ ID NO: 1709

SEQ ID NO: 211817 - DNA, 834 bp, Canis familiaris; identical to SEQ ID NO: 1710
  misc_feature (188)..(188): n is a, c, g, or t

SEQ ID NO: 211818 - DNA, 773 bp, Canis familiaris; identical to SEQ ID NO: 1711

SEQ ID NO: 211819 - DNA, 684 bp, Canis familiaris; identical to SEQ ID NO: 1712

SEQ ID NO: 211820 - DNA, 728 bp, Canis familiaris; identical to SEQ ID NO: 1713

SEQ ID NO: 211821 - DNA, 704 bp, Canis familiaris; identical to SEQ ID NO: 1714

SEQ ID NO: 211822 - DNA, 688 bp, Canis familiaris; identical to SEQ ID NO: 1715

SEQ ID NO: 211823 - DNA, 617 bp, Canis familiaris; identical to SEQ ID NO: 1716

SEQ ID NO: 211824 - DNA, 731 bp, Canis familiaris; identical to SEQ ID NO: 1717

SEQ ID NO: 211825 - DNA, 680 bp, Canis familiaris; identical to SEQ ID NO: 1718

SEQ ID NO: 211826 - DNA, 611 bp, Canis familiaris; identical to SEQ ID NO: 1719

SEQ ID NO: 211827 - DNA, 518 bp, Canis familiaris; identical to SEQ ID NO: 1720

SEQ ID NO: 211828 - DNA, 169 bp, Canis familiaris; identical to SEQ ID NO: 1721

SEQ ID NO: 211829 - DNA, 584 bp, Canis familiaris; identical to SEQ ID NO: 1722

SEQ ID NO: 211830 - DNA, 584 bp, Canis familiaris; identical to SEQ ID NO: 1723

SEQ ID NO: 211831 - DNA, 705 bp, Canis familiaris; identical to SEQ ID NO: 1724

SEQ ID NO: 211832 - DNA, 686 bp, Canis familiaris; identical to SEQ ID NO: 1725

SEQ ID NO: 211833 - DNA, 226 bp, Canis familiaris; identical to SEQ ID NO: 1726

SEQ ID NO: 211834 - DNA, 582 bp, Canis familiaris; identical to SEQ ID NO: 1727

SEQ ID NO: 211835 - DNA, 582 bp, Canis familiaris; identical to SEQ ID NO: 1728

SEQ ID NO: 211836 - DNA, 628 bp, Canis familiaris; identical to SEQ ID NO: 1729

SEQ ID NO: 211837 - DNA, 609 bp, Canis familiaris; identical to SEQ ID NO: 1730

SEQ ID NO: 211838 - DNA, 618 bp, Canis familiaris; identical to SEQ ID NO: 1731

SEQ ID NO: 211839 - DNA, 618 bp, Canis familiaris; identical to SEQ ID NO: 1732

SEQ ID NO: 211840 - DNA, 763 bp, Canis familiaris; identical to SEQ ID NO: 1733

SEQ ID NO: 211841 - DNA, 678 bp, Canis familiaris; identical to SEQ ID NO: 1734

SEQ ID NO: 211842 - DNA, 676 bp, Canis familiaris; identical to SEQ ID NO: 1735

SEQ ID NO: 211843 - DNA, 398 bp, Canis familiaris; identical to SEQ ID NO: 1736

SEQ ID NO: 211844 - DNA, 740 bp, Canis familiaris; identical to SEQ ID NO: 1737

SEQ ID NO: 211845 - DNA, 620 bp, Canis familiaris; identical to SEQ ID NO: 1738

SEQ ID NO: 211846 - DNA, 612 bp, Canis familiaris; identical to SEQ ID NO: 1739

SEQ ID NO: 211847 - DNA, 669 bp, Canis familiaris; identical to SEQ ID NO: 1740

SEQ ID NO: 211848 - DNA, 669 bp, Canis familiaris; identical to SEQ ID NO: 1741

SEQ ID NO: 211849 - DNA, 655 bp, Canis familiaris; identical to SEQ ID NO: 1742

SEQ ID NO: 211850 - DNA, 619 bp, Canis familiaris; identical to SEQ ID NO: 1743

SEQ ID NO: 211851 - DNA, 732 bp, Canis familiaris; identical to SEQ ID NO: 1744
  misc_feature (371)..(371): n is a, c, g, or t

SEQ ID NO: 211852 - DNA, 688 bp, Canis familiaris; identical to SEQ ID NO: 1745

SEQ ID NO: 211853 - DNA, 747 bp, Canis familiaris; identical to SEQ ID NO: 1746
  misc_feature (181)..(181): n is a, c, g, or t

SEQ ID NO: 211854 - DNA, 665 bp, Canis familiaris; identical to SEQ ID NO: 1747
  misc_feature (313)..(313): n is a, c, g, or t

SEQ ID NO: 211855 - DNA, 703 bp, Canis familiaris; identical to SEQ ID NO: 1748

SEQ ID NO: 211856 - DNA, 713 bp, Canis familiaris; identical to SEQ ID NO: 1749

SEQ ID NO: 211857 - DNA, 663 bp, Canis familiaris; identical to SEQ ID NO: 1750

SEQ ID NO: 211858 - DNA, 690 bp, Canis familiaris; identical to SEQ ID NO: 1751

SEQ ID NO: 211859 - DNA, 683 bp, Canis familiaris; identical to SEQ ID NO: 1752

SEQ ID NO: 211860 - DNA, 695 bp, Canis familiaris; identical to SEQ ID NO: 1753

SEQ ID NO: 211861 - DNA, 208 bp, Canis familiaris; identical to SEQ ID NO: 1754

SEQ ID NO: 211862 - DNA, 285 bp, Canis familiaris; identical to SEQ ID NO: 1755

SEQ ID NO: 211863 - DNA, 669 bp, Canis familiaris; identical to SEQ ID NO: 1756

SEQ ID NO: 211864 - DNA, 653 bp, Canis familiaris; identical to SEQ ID NO: 1757

SEQ ID NO: 211865 - DNA, 597 bp, Canis familiaris; identical to SEQ ID NO: 1758

SEQ ID NO: 211866 - DNA, 596 bp, Canis familiaris; identical to SEQ ID NO: 1759

SEQ ID NO: 211867 - DNA, 529 bp, Canis familiaris; identical to SEQ ID NO: 1760

SEQ ID NO: 211868 - DNA, 547 bp, Canis familiaris; identical to SEQ ID NO: 1761

SEQ ID NO: 211869 - DNA, 637 bp, Canis familiaris; identical to SEQ ID NO: 1762

SEQ ID NO: 211870 - DNA, 600 bp, Canis familiaris; identical to SEQ ID NO: 1763

SEQ ID NO: 211871 - DNA, 626 bp, Canis familiaris; identical to SEQ ID NO: 1764

SEQ ID NO: 211872 - DNA, 733 bp, Canis familiaris; identical to SEQ ID NO: 1765
  misc_feature (341)..(341): n is a, c, g, or t

SEQ ID NO: 211873 - DNA, 997 bp, Canis familiaris; identical to SEQ ID NO: 1766

SEQ ID NO: 211874 - DNA, 718 bp, Canis familiaris; identical to SEQ ID NO: 1767

SEQ ID NO: 211875 - DNA, 639 bp, Canis familiaris; identical to SEQ ID NO: 1768

SEQ ID NO: 211876 - DNA, 806 bp, Canis familiaris; identical to SEQ ID NO: 1769

SEQ ID NO: 211877 - DNA, 775 bp, Canis familiaris; identical to SEQ ID NO: 1770

SEQ ID NO: 211878 - DNA, 772 bp, Canis familiaris; identical to SEQ ID NO: 1771
  misc_feature (712)..(712): n is a, c, g, or t

SEQ ID NO: 211879 - DNA, 752 bp, Canis familiaris; identical to SEQ ID NO: 1772

SEQ ID NO: 211880 - DNA, 754 bp, Canis familiaris; identical to SEQ ID NO: 1773

SEQ ID NO: 211881 - DNA, 663 bp, Canis familiaris; identical to SEQ ID NO: 1774
  misc_feature (68)..(68): n is a, c, g, or t
  misc_feature (137)..(138): n is a, c, g, or t
  misc_feature (192)..(192): n is a, c, g, or t

SEQ ID NO: 211882 - DNA, 600 bp, Canis familiaris
gggggccatcgtsgccaccgccatcctctcrggcatcacctcctcccttccggacaactccctcggccgaaacgagctggcccctggtgtgaactccggtcagggcttgggcatcgagatcattggcaccctgcagctggtgctgtgcgtgctggccaccacggacaggaggcggcgtgacctcgggggctcgggccccctggccatcggcctctctgtggccttgggacacctgctggcgatcgactacacaggctgcggtatcaaccccgcccggtccttcggctcctcggtgatcacacataacttcaaggaccactggattttctgggtcgggccgttcatcgggggagccctggcggtgctcatctacgacttcatcctggccccccgcagcagcgacctcacggaccgcgtgaaggtgtggaccagcggccaggtggaggagtatgagctggacgscgacgacatcaactccmgggtggagatgaagcccaagtagagaggccttggcccgggcacccacgcgggggtgggcaggggcgggcggagggcgggaggggtgcaatcacgtcctagacactctgacaagctgaccaa

SEQ ID NO: 211883 - DNA, 665 bp, Canis familiaris; identical to SEQ ID NO: 1776

SEQ ID NO: 211884 - DNA, 665 bp, Canis familiaris; identical to SEQ ID NO: 1777

SEQ ID NO: 211885 - DNA, 653 bp, Canis familiaris; identical to SEQ ID NO: 1778

SEQ ID NO: 211886 - DNA, 719 bp, Canis familiaris; identical to SEQ ID NO: 1779

SEQ ID NO: 211887 - DNA, 785 bp, Canis familiaris; identical to SEQ ID NO: 1780

SEQ ID NO: 211888 - DNA, 432 bp, Canis familiaris; identical to SEQ ID NO: 1781

SEQ ID NO: 211889 - DNA, 752 bp, Canis familiaris; identical to SEQ ID NO: 1782

SEQ ID NO: 211890 - DNA, 701 bp, Canis familiaris; identical to SEQ ID NO: 1783

SEQ ID NO: 211891 - DNA, 780 bp, Canis familiaris; identical to SEQ ID NO: 1784

SEQ ID NO: 211892 - DNA, 753 bp, Canis familiaris; identical to SEQ ID NO: 1785

SEQ ID NO: 211893 - DNA, 722 bp, Canis familiaris; identical to SEQ ID NO: 1786

SEQ ID NO: 211894 - DNA, 687 bp, Canis familiaris; identical to SEQ ID NO: 1787

SEQ ID NO: 211895 - DNA, 750 bp, Canis familiaris; identical to SEQ ID NO: 1788

SEQ ID NO: 211896 - DNA, 444 bp, Canis familiaris; identical to SEQ ID NO: 1789

SEQ ID NO: 211897 - DNA, 675 bp, Canis familiaris; identical to SEQ ID NO: 1790

SEQ ID NO: 211898 - DNA, 678 bp, Canis familiaris; identical to SEQ ID NO: 1791

SEQ ID NO: 211899 - DNA, 678 bp, Canis familiaris; identical to SEQ ID NO: 1792

SEQ ID NO: 211900 - DNA, 709 bp, Canis familiaris; identical to SEQ ID NO: 1793

SEQ ID NO: 211901 - DNA, 703 bp, Canis familiaris; identical to SEQ ID NO: 1794

SEQ ID NO: 211902 - DNA, 730 bp, Canis familiaris; identical to SEQ ID NO: 1795

SEQ ID NO: 211903 - DNA, 694 bp, Canis familiaris; identical to SEQ ID NO: 1796
  misc_feature (28)..(28): n is a, c, g, or t

SEQ ID NO: 211904 - DNA, 406 bp, Canis familiaris; identical to SEQ ID NO: 1797
  misc_feature (152)..(152): n is a, c, g, or t

SEQ ID NO: 211905 - DNA, 773 bp, Canis familiaris; identical to SEQ ID NO: 1798

SEQ ID NO: 211906 - DNA, 259 bp, Canis familiaris; identical to SEQ ID NO: 1799

SEQ ID NO: 211907 - DNA, 639 bp, Canis familiaris; identical to SEQ ID NO: 1800

SEQ ID NO: 211908 - DNA, 673 bp, Canis familiaris; identical to SEQ ID NO: 1801

SEQ ID NO: 211909 - DNA, 377 bp, Canis familiaris; identical to SEQ ID NO: 1802

SEQ ID NO: 211910 - DNA, 350 bp, Canis familiaris; identical to SEQ ID NO: 1803

SEQ ID NO: 211911 - DNA, 673 bp, Canis familiaris; identical to SEQ ID NO: 1804

SEQ ID NO: 211912 - DNA, 633 bp, Canis familiaris; identical to SEQ ID NO: 1805
  misc_feature (34)..(34): n is a, c, g, or t

SEQ ID NO: 211913 - DNA, 668 bp, Canis familiaris; identical to SEQ ID NO: 1806
  misc_feature (115)..(115): n is a, c, g, or t
  misc_feature (150)..(150): n is a, c, g, or t

SEQ ID NO: 211914 - DNA, 630 bp, Canis familiaris; identical to SEQ ID NO: 1807

SEQ ID NO: 211915 - DNA, 328 bp, Canis familiaris; identical to SEQ ID NO: 1808

SEQ ID NO: 211916 - DNA, 619 bp, Canis familiaris; identical to SEQ ID NO: 1809

SEQ ID NO: 211917 - DNA, 733 bp, Canis familiaris; identical to SEQ ID NO: 1810

SEQ ID NO: 211918 - DNA, 733 bp, Canis familiaris; identical to SEQ ID NO: 1811

SEQ ID NO: 211919 - DNA, 594 bp, Canis familiaris; identical to SEQ ID NO: 1812

SEQ ID NO: 211920 - DNA, 732 bp, Canis familiaris; identical to SEQ ID NO: 1813

SEQ ID NO: 211921 - DNA, 677 bp, Canis familiaris; identical to SEQ ID NO: 1814

SEQ ID NO: 211922 - DNA, 501 bp, Canis familiaris; identical to SEQ ID NO: 1815

SEQ ID NO: 211923 - DNA, 759 bp, Canis familiaris; identical to SEQ ID NO: 1816

SEQ ID NO: 211924 - DNA, 721 bp, Canis familiaris; identical to SEQ ID NO: 1817

SEQ ID NO: 211925 - DNA, 680 bp, Canis familiaris; identical to SEQ ID NO: 1818

SEQ ID NO: 211926 - DNA, 693 bp, Canis familiaris; identical to SEQ ID NO: 1819

SEQ ID NO: 211927 - DNA, 702 bp, Canis familiaris; identical to SEQ ID NO: 1820

SEQ ID NO: 211928 - DNA, 699 bp, Canis familiaris; identical to SEQ ID NO: 1821

SEQ ID NO: 211929 - DNA, 725 bp, Canis familiaris; identical to SEQ ID NO: 1822

SEQ ID NO: 211930 - DNA, 624 bp, Canis familiaris; identical to SEQ ID NO: 1823

SEQ ID NO: 211931 - DNA, 756 bp, Canis familiaris; identical to SEQ ID NO: 1824

SEQ ID NO: 211932 - DNA, 740 bp, Canis familiaris; identical to SEQ ID NO: 1825

SEQ ID NO: 211933 - DNA, 720 bp, Canis familiaris; identical to SEQ ID NO: 1826

SEQ ID NO: 211934 - DNA, 737 bp, Canis familiaris; identical to SEQ ID NO: 1827

SEQ ID NO: 211935 - DNA, 786 bp, Canis familiaris; identical to SEQ ID NO: 1828

SEQ ID NO: 211936 - DNA, 714 bp, Canis familiaris; identical to SEQ ID NO: 1829

SEQ ID NO: 211937 - DNA, 663 bp, Canis familiaris; identical to SEQ ID NO: 1830

SEQ ID NO: 211938 - DNA, 650 bp, Canis familiaris; identical to SEQ ID NO: 1831

SEQ ID NO: 211939 - DNA, 573 bp, Canis familiaris; identical to SEQ ID NO: 1832

SEQ ID NO: 211940 - DNA, 586 bp, Canis familiaris; identical to SEQ ID NO: 1833

SEQ ID NO: 211941 - DNA, 665 bp, Canis familiaris; identical to SEQ ID NO: 1834

SEQ ID NO: 211942 - DNA, 637 bp, Canis familiaris; identical to SEQ ID NO: 1835

SEQ ID NO: 211943 - DNA, 446 bp, Canis familiaris; identical to SEQ ID NO: 1836

SEQ ID NO: 211944 - DNA, 626 bp, Canis familiaris; identical to SEQ ID NO: 1837

SEQ ID NO: 211945 - DNA, 684 bp, Canis familiaris; identical to SEQ ID NO: 1838

SEQ ID NO: 211946 - DNA, 651 bp, Canis familiaris; identical to SEQ ID NO: 1839

SEQ ID NO: 211947 - DNA, 532 bp, Canis familiaris; identical to SEQ ID NO: 1840

SEQ ID NO: 211948 - DNA, 909 bp, Canis familiaris; identical to SEQ ID NO: 1841
  misc_feature (14)..(14): n is a, c, g, or t
  misc_feature (366)..(366): n is a, c, g, or t
  misc_feature (369)..(369): n is a, c, g, or t

SEQ ID NO: 211949 - DNA, 802 bp, Canis familiaris; identical to SEQ ID NO: 1842
  misc_feature (121)..(121): n is a, c, g, or t

SEQ ID NO: 211950 - DNA, 699 bp, Canis familiaris; identical to SEQ ID NO: 1843

SEQ ID NO: 211951 - DNA, 710 bp, Canis familiaris; identical to SEQ ID NO: 1844

SEQ ID NO: 211952 - DNA, 741 bp, Canis familiaris; identical to SEQ ID NO: 1845

SEQ ID NO: 211953 - DNA, 590 bp, Canis familiaris; identical to SEQ ID NO: 1846

SEQ ID NO: 211954 - DNA, 663 bp, Canis familiaris; identical to SEQ ID NO: 1847
  misc_feature (12)..(12): n is a, c, g, or t

SEQ ID NO: 211955 - DNA, 652 bp, Canis familiaris; identical to SEQ ID NO: 1848

SEQ ID NO: 211956 - DNA, 607 bp, Canis familiaris; identical to SEQ ID NO: 1849

SEQ ID NO: 211957 - DNA, 938 bp, Canis familiaris; identical to SEQ ID NO: 1850

SEQ ID NO: 211958 - DNA, 643 bp, Canis familiaris; identical to SEQ ID NO: 1851

SEQ ID NO: 211959 - DNA, 787 bp, Canis familiaris; identical to SEQ ID NO: 1852

SEQ ID NO: 211960 - DNA, 652 bp, Canis familiaris; identical to SEQ ID NO: 1853

SEQ ID NO: 211961 - DNA, 592 bp, Canis familiaris; identical to SEQ ID NO: 1854

SEQ ID NO: 211962 - DNA, 660 bp, Canis familiaris; identical to SEQ ID NO: 1855

SEQ ID NO: 211963 - DNA, 592 bp, Canis familiaris; identical to SEQ ID NO: 1856

SEQ ID NO: 211964 - DNA, 663 bp, Canis familiaris; identical to SEQ ID NO: 1857
  misc_feature (47)..(47): n is a, c, g, or t

SEQ ID NO: 211965 - DNA, 707 bp, Canis familiaris; identical to SEQ ID NO: 1858

SEQ ID NO: 211966 - DNA, 708 bp, Canis familiaris; identical to SEQ ID NO: 1859

SEQ ID NO: 211967 - DNA, 620 bp, Canis familiaris; identical to SEQ ID NO: 1860
  misc_feature (60)..(60): n is a, c, g, or t

SEQ ID NO: 211968 - DNA, 602 bp, Canis familiaris; identical to SEQ ID NO: 1861

SEQ ID NO: 211969 - DNA, 720 bp, Canis familiaris; identical to SEQ ID NO: 1862

SEQ ID NO: 211970 - DNA, 688 bp, Canis familiaris; identical to SEQ ID NO: 1863

SEQ ID NO: 211971 - DNA, 571 bp, Canis familiaris; identical to SEQ ID NO: 1864

SEQ ID NO: 211972 - DNA, 713 bp, Canis familiaris; identical to SEQ ID NO: 1865

SEQ ID NO: 211973 - DNA, 721 bp, Canis familiaris; identical to SEQ ID NO: 1866

SEQ ID NO: 211974 - DNA, 1400 bp, Canis familiaris
aagtgatggaggccaaagtcagaaggatccagaagcagaagaaacagtctctgagaaggaaaacgagctggcggaaatggcaggtctgcaggctaggagacaaagtgaagagaatttaagaaatattaatatgttctttgacgacttaccwwatagagacgtgaatattgaggatgaagaaagtaaagattttgttaaggacagtaggaggaacaaacaagatgtgatctttgacagtgaaagagaatctatagaggagccagacagttacttggaaggtgaaagcgaaagtcagcaaggtaccactgatggcttcgagcagcctgagtcagtagaatttagtagtggagagaaagaggatgatgatgaagtggaaactgaccaaaacttgtggtatagcagaaaatttatcgaacaaggacacaaggaagagaccgaacacatactgtccaaattcatggcaaaatatgattttaagtgtgaccacttgtcagagattccagaggagcaggaaggagcagaggattcagaaggaagtggaatagaggagcaagaggtagaggcaaatgagaatgtggaggtgcctgcaggaaaagaggagaaggaaatagagatcctgtcagatgacctgacagacagagcagaggatcatgagttttcagaagatgaagaaccagaggatatggctgaggaacttgatgaagatctggaaagcaagaagaatgttccagcagatgtggccagtgacaactcccttaaaaaggacgagacaaccaaacaagaaaaacgagctatttgtgaatacaatgaaaatccaaaaggaaacatgcattatcatgcaaagagcagttcttcagaagtcctgaatgatagtgaatcaacaccaaataaagatgtgaaaaaatcaaagaagattttcctctttaaaaggatgtcattgatgagtcagaaaagtatgcagagtaataatgagccactcccagagataaaaccaataggagatcaaatagcttttaaaggcaataagaaagatgccaaccagaaccacatggggcaaaaccatcaggatacttcacccccagatatggagagaagatcaaaatcttgtacaatactataaatatatatttatgtttccgtggtcaccaagcacattgtattttatacttgaaaaacattttgacttctgaaagaaagttcctgataacaaacttttaaagatataataatatgttttatttgatttgaatattatgaccagtcttggtatttatttatgctaatatttttgacgagcaatttcaaaataagtgtatctcaaactctccttcaagtgttgtggccttaactgttcagtgttggaataaaaaatatatttttataaaaaaaaaaaaaaaaaa

SEQ ID NO: 211975 - DNA, 445 bp, Canis familiaris; identical to SEQ ID NO: 1868

SEQ ID NO: 211976 - DNA, 657 bp, Canis familiaris; identical to SEQ ID NO: 1869

SEQ ID NO: 211977 - DNA, 655 bp, Canis familiaris; identical to SEQ ID NO: 1870

SEQ ID NO: 211978 - DNA, 566 bp, Canis familiaris; identical to SEQ ID NO: 1871

SEQ ID NO: 211979 - DNA, 739 bp, Canis familiaris; identical to SEQ ID NO: 1872

SEQ ID NO: 211980 - DNA, 739 bp, Canis familiaris; identical to SEQ ID NO: 1873

SEQ ID NO: 211981 - DNA, 657 bp, Canis familiaris; identical to SEQ ID NO: 1874

SEQ ID NO: 211982 - DNA, 681 bp, Canis familiaris; identical to SEQ ID NO: 1875

SEQ ID NO: 211983 - DNA, 659 bp, Canis familiaris; identical to SEQ ID NO: 1876

SEQ ID NO: 211984 - DNA, 534 bp, Canis familiaris; identical to SEQ ID NO: 1877

SEQ ID NO: 211985 - DNA, 532 bp, Canis familiaris; identical to SEQ ID NO: 1878

SEQ ID NO: 211986 - DNA, 384 bp, Canis familiaris; identical to SEQ ID NO: 1879

SEQ ID NO: 211987 - DNA, 705 bp, Canis familiaris; identical to SEQ ID NO: 1880
  misc_feature (326)..(326): n is a, c, g, or t

SEQ ID NO: 211988 - DNA, 666 bp, Canis familiaris; identical to SEQ ID NO: 1881

SEQ ID NO: 211989 - DNA, 660 bp, Canis familiaris; identical to SEQ ID NO: 1882

SEQ ID NO: 211990 - DNA, 639 bp, Canis familiaris; identical to SEQ ID NO: 1883

SEQ ID NO: 211991 - DNA, 717 bp, Canis familiaris; identical to SEQ ID NO: 1884

SEQ ID NO: 211992 - DNA, 689 bp, Canis familiaris; identical to SEQ ID NO: 1885

SEQ ID NO: 211993 - DNA, 695 bp, Canis familiaris; identical to SEQ ID NO: 1886

SEQ ID NO: 211994 - DNA, 695 bp, Canis familiaris; identical to SEQ ID NO: 1887

SEQ ID NO: 211995 - DNA, 756 bp, Canis familiaris; identical to SEQ ID NO: 1888

SEQ ID NO: 211996 - DNA, 701 bp, Canis familiaris; identical to SEQ ID NO: 1889

SEQ ID NO: 211997 - DNA, 700 bp, Canis familiaris; identical to SEQ ID NO: 1890

SEQ ID NO: 211998 - DNA, 564 bp, Canis familiaris; identical to SEQ ID NO: 1891

SEQ ID NO: 211999 - DNA, 698 bp, Canis familiaris; identical to SEQ ID NO: 1892

SEQ ID NO: 212000 - DNA, 721 bp, Canis familiaris; identical to SEQ ID NO: 1893

SEQ ID NO: 212001 - DNA, 685 bp, Canis familiaris; identical to SEQ ID NO: 1894

SEQ ID NO: 212002 - DNA, 672 bp, Canis familiaris; identical to SEQ ID NO: 1895

SEQ ID NO: 212003 - DNA, 582 bp, Canis familiaris; identical to SEQ ID NO: 1896

SEQ ID NO: 212004 - DNA, 721 bp, Canis familiaris; identical to SEQ ID NO: 1897

SEQ ID NO: 212005 - DNA, 639 bp, Canis familiaris; identical to SEQ ID NO: 1898
  misc_feature (334)..(334): n is a, c, g, or t

SEQ ID NO: 212006 - DNA, 642 bp, Canis familiaris; identical to SEQ ID NO: 1899

SEQ ID NO: 212007 - DNA, 641 bp, Canis familiaris; identical to SEQ ID NO: 1900

SEQ ID NO: 212008 - DNA, 719 bp, Canis familiaris; identical to SEQ ID NO: 1901

SEQ ID NO: 212009 - DNA, 726 bp, Canis familiaris; identical to SEQ ID NO: 1902

SEQ ID NO: 212010 - DNA, 671 bp, Canis familiaris; identical to SEQ ID NO: 1903

SEQ ID NO: 212011 - DNA, 662 bp, Canis familiaris; identical to SEQ ID NO: 1904

SEQ ID NO: 212012 - DNA, 643 bp, Canis familiaris; identical to SEQ ID NO: 1905

SEQ ID NO: 212013 - DNA, 643 bp, Canis familiaris; identical to SEQ ID NO: 1906

SEQ ID NO: 212014 - DNA, 665 bp, Canis familiaris; identical to SEQ ID NO: 1907

SEQ ID NO: 212015 - DNA, 665 bp, Canis familiaris; identical to SEQ ID NO: 1908

SEQ ID NO: 212016 - DNA, 705 bp, Canis familiaris; identical to SEQ ID NO: 1909

SEQ ID NO: 212017 - DNA, 609 bp, Canis familiaris; identical to SEQ ID NO: 1910

SEQ ID NO: 212018 - DNA, 791 bp, Canis familiaris; identical to SEQ ID NO: 1911

SEQ ID NO: 212019 - DNA, 409 bp, Canis familiaris; identical to SEQ ID NO: 1912

SEQ ID NO: 212020 - DNA, 801 bp, Canis familiaris; identical to SEQ ID NO: 1913

SEQ ID NO: 212021 - DNA, 565 bp, Canis familiaris; identical to SEQ ID NO: 1914

SEQ ID NO: 212022 - DNA, 598 bp, Canis familiaris; identical to SEQ ID NO: 1915

SEQ ID NO: 212023 - DNA, 541 bp, Canis familiaris; identical to SEQ ID NO: 1916

SEQ ID NO: 212024 - DNA, 585 bp, Canis familiaris; identical to SEQ ID NO: 1917

SEQ ID NO: 212025 - DNA, 576 bp, Canis familiaris; identical to SEQ ID NO: 1918

SEQ ID NO: 212026 - DNA, 723 bp, Canis familiaris; identical to SEQ ID NO: 1919

SEQ ID NO: 212027 - DNA, 661 bp, Canis familiaris; identical to SEQ ID NO: 1920

SEQ ID NO: 212028 - DNA, 640 bp, Canis familiaris; identical to SEQ ID NO: 1921
  misc_feature (64)..(64): n is a, c, g, or t

SEQ ID NO: 212029 - DNA, 649 bp, Canis familiaris; identical to SEQ ID NO: 1922

SEQ ID NO: 212030 - DNA, 654 bp, Canis familiaris; identical to SEQ ID NO: 1923

SEQ ID NO: 212031 - DNA, 741 bp, Canis familiaris; identical to SEQ ID NO: 1924
  misc_feature (86)..(86): n is a, c, g, or t

SEQ ID NO: 212032 - DNA, 741 bp, Canis familiaris; identical to SEQ ID NO: 1925
  misc_feature (656)..(656): n is a, c, g, or t

SEQ ID NO: 212033 - DNA, 1024 bp, Canis familiaris; identical to SEQ ID NO: 1926

SEQ ID NO: 212034 - DNA, 613 bp, Canis familiaris; identical to SEQ ID NO: 1927

SEQ ID NO: 212035 - DNA, 754 bp, Canis familiaris; identical to SEQ ID NO: 1928

SEQ ID NO: 212036 - DNA, 708 bp, Canis familiaris; identical to SEQ ID NO: 1929

SEQ ID NO: 212037 - DNA, 711 bp, Canis familiaris; identical to SEQ ID NO: 1930

SEQ ID NO: 212038 - DNA, 690 bp, Canis familiaris; identical to SEQ ID NO: 1931

SEQ ID NO: 212039 - DNA, 724 bp, Canis familiaris; identical to SEQ ID NO: 1932

SEQ ID NO: 212040 - DNA, 592 bp, Canis familiaris; identical to SEQ ID NO: 1933

SEQ ID NO: 212041 - DNA, 675 bp, Canis familiaris; identical to SEQ ID NO: 1934

SEQ ID NO: 212042 - DNA, 580 bp, Canis familiaris; identical to SEQ ID NO: 1935

SEQ ID NO: 212043 - DNA, 580 bp, Canis familiaris; identical to SEQ ID NO: 1936

SEQ ID NO: 212044 - DNA, 580 bp, Canis familiaris; identical to SEQ ID NO: 1937

SEQ ID NO: 212045 - DNA, 650 bp, Canis familiaris; identical to SEQ ID NO: 1938

SEQ ID NO: 212046 - DNA, 599 bp, Canis familiaris; identical to SEQ ID NO: 1939

SEQ ID NO: 212047 - DNA, 647 bp, Canis familiaris; identical to SEQ ID NO: 1940

SEQ ID NO: 212048 - DNA, 391 bp, Canis familiaris; identical to SEQ ID NO: 1941

SEQ ID NO: 212049 - DNA, 590 bp, Canis familiaris; identical to SEQ ID NO: 1942

SEQ ID NO: 212050 - DNA, 600 bp, Canis familiaris
ccctgccccgccacattgccttctgcacaccgggccctgagcgccagggaaggacccggatgggcctggcagccttcagctctgtagttaaatgggcgtgctcacccctacctggtaatttaagattctggagagtggctctgccctgtgcccaaggaacggtgctgattgtacccctcccaactgccctcacccccccccagagccacccccaaagagatgccttgatattctcaatgcagccctgccttgggctgccttggtgctgtcacacacttcaggctcttaccttgccacgattttctgtggctcacagcaccctcggagccaacagacggaaactgtctcaagagggcactggtggcctgacagcccggcgtggcatggggcagtgggacaggggcgcggatgtggccgccccacacacctggcttctcactgctggctgccttaggacctctcctacattagcagtttgctttgtatgcactttgttcttttctttcgatgtttatttttccactttgtgattgaatttcttgaccgaaggactcaggttgtctgaagtcactccacggtgcatctcagcccacatagtga

SEQ ID NO: 212051 - DNA, 716 bp, Canis familiaris; identical to SEQ ID NO: 1944

SEQ ID NO: 212052 - DNA, 639 bp, Canis familiaris; identical to SEQ ID NO: 1945

SEQ ID NO: 212053 - DNA, 603 bp, Canis familiaris; identical to SEQ ID NO: 1946

SEQ ID NO: 212054 - DNA, 670 bp, Canis familiaris; identical to SEQ ID NO: 1947

SEQ ID NO: 212055 - DNA, 605 bp, Canis familiaris; identical to SEQ ID NO: 1948

SEQ ID NO: 212056 - DNA, 605 bp, Canis familiaris; identical to SEQ ID NO: 1949

SEQ ID NO: 212057 - DNA, 676 bp, Canis familiaris; identical to SEQ ID NO: 1950

SEQ ID NO: 212058 - DNA, 548 bp, Canis familiaris; identical to SEQ ID NO: 1951

SEQ ID NO: 212059 - DNA, 715 bp, Canis familiaris; identical to SEQ ID NO: 1952

SEQ ID NO: 212060 - DNA, 564 bp, Canis familiaris; identical to SEQ ID NO: 1953

SEQ ID NO: 212061 - DNA, 1400 bp, Canis familiaris
actgacccgtcactctccgagatggtggaaatagccatcaagattctgagcaagaascccagaggcttcttcttgctggtggaaggaggcaggattgaccacgggcatcacgagggcaaggccaagcaggcgctgcacgargcagtggagatggaccgggcaattgggaaggcaggcgtcatgacctccttggaagacacgctgaccgtcgtcactgcggaccactcccacgtcttcacctttggsgggtacaccccccggggcaactctatctttggtctggcccccatgrtgagtgacacggacaagaagcccttcacggccatcctgtatggcaacgggcctggctacaaggtggtgggcggtgagcgagagaacgtctccatggtggactacgctcacaacaactaccaggcgcagtccgcggtgcccctgcgccacgagacccacggtggggaggacgtagcagtcttcgccaagggtcccatggcacacctgctgcacggcgtccacgagcagaactacatcccccacgtgatggcttatgcggcctgcatcggtgccaaccaggaccactgtgcctcagccagctcggcaggtggcccttctccaggtcccctgctcctcctgctggccctgctccccgtgggcatcctattctgagggcccaggacctgggcacccaccagcctatgacagatggccagcctccctctctcagtgctgcccaccgcctgggagcccacacctcaagggccaggtaggcgggaggccttcacagcctctgcagctggcagaaagaggacccaggaaaccaaagtctgctgcccacctcactcccctctggaatcctccaccagggccagccgagttcctggcctccggcctccgctccctccctgctgcccctttggccaacagagtaggtttctctcgggcaggcagagaatacagactgcagaaattctcaaagcatcttatttttctagcaaacacatttctccagacctggaggccccagagcttccatggaacattccggatctgaccttcccactcccctcccctcctggaaccaccaggccccatcatgctaagtccctactgcaggggagaccaggttctccacaggaaggggatttgctcactcattccaaggctgccgggggctcccaagaagtgaactgggactggccatccgaccccagggcttcctgggctgggaagagcagcagcctggacagacagacatttctcagctcttaacatgcattgcccactcctctctgaaggaacactcctgtttgggacggcaaaatttttttcccctctttttggtgttggttaaaagggaacacaaaacatttaaataaaactttccaaatatttctgaggacaga

SEQ ID NO: 212062 - DNA, 641 bp, Canis familiaris; identical to SEQ ID NO: 1955

SEQ ID NO: 212063 - DNA, 579 bp, Canis familiaris; identical to SEQ ID NO: 1956

SEQ ID NO: 212064 - DNA, 544 bp, Canis familiaris; identical to SEQ ID NO: 1957

SEQ ID NO: 212065 - DNA, 737 bp, Canis familiaris; identical to SEQ ID NO: 1958

SEQ ID NO: 212066 - DNA, 670 bp, Canis familiaris; identical to SEQ ID NO: 1959

SEQ ID NO: 212067 - DNA, 636 bp, Canis familiaris; identical to SEQ ID NO: 1960

SEQ ID NO: 212068 - DNA, 833 bp, Canis familiaris; identical to SEQ ID NO: 1961

SEQ ID NO: 212069 - DNA, 714 bp, Canis familiaris; identical to SEQ ID NO: 1962

SEQ ID NO: 212070 - DNA, 632 bp, Canis familiaris; identical to SEQ ID NO: 1963

SEQ ID NO: 212071 - DNA, 645 bp, Canis familiaris; identical to SEQ ID NO: 1964

SEQ ID NO: 212072 - DNA, 569 bp, Canis familiaris; identical to SEQ ID NO: 1965

SEQ ID NO: 212073 - DNA, 731 bp, Canis familiaris; identical to SEQ ID NO: 1966
  misc_feature (6)..(6): n is a, c, g, or t

SEQ ID NO: 212074 - DNA, 731 bp, Canis familiaris; identical to SEQ ID NO: 1967
  misc_feature (6)..(6): n is a, c, g, or t

SEQ ID NO: 212075 - DNA, 621 bp, Canis familiaris; identical to SEQ ID NO: 1968

SEQ ID NO: 212076 - DNA, 596 bp, Canis familiaris; identical to SEQ ID NO: 1969

SEQ ID NO: 212077 - DNA, 673 bp, Canis familiaris; identical to SEQ ID NO: 1970
  misc_feature (40)..(40): n is a, c, g, or t

SEQ ID NO: 212078 - DNA, 776 bp, Canis familiaris; identical to SEQ ID NO: 1971

SEQ ID NO: 212079 - DNA, 650 bp, Canis familiaris; identical to SEQ ID NO: 1972

SEQ ID NO: 212080 - DNA, 650 bp, Canis familiaris; identical to SEQ ID NO: 1973

SEQ ID NO: 212081 - DNA, 655 bp, Canis familiaris; identical to SEQ ID NO: 1974

SEQ ID NO: 212082 - DNA, 686 bp, Canis familiaris; identical to SEQ ID NO: 1975

SEQ ID NO: 212083 - DNA, 653 bp, Canis familiaris; identical to SEQ ID NO: 1976

SEQ ID NO: 212084 - DNA, 460 bp, Canis familiaris; identical to SEQ ID NO: 1977

SEQ ID NO: 212085 - DNA, 633 bp, Canis familiaris; identical to SEQ ID NO: 1978

SEQ ID NO: 212086 - DNA, 465 bp, Canis familiaris; identical to SEQ ID NO: 1979

SEQ ID NO: 212087 - DNA, 560 bp, Canis familiaris; identical to SEQ ID NO: 1980

SEQ ID NO: 212088 - DNA, 560 bp, Canis familiaris; identical to SEQ ID NO: 1981

SEQ ID NO: 212089 - DNA, 529 bp, Canis familiaris; identical to SEQ ID NO: 1982

SEQ ID NO: 212090 - DNA, 617 bp, Canis familiaris; identical to SEQ ID NO: 1983

SEQ ID NO: 212091 - DNA, 597 bp, Canis familiaris; identical to SEQ ID NO: 1984

SEQ ID NO: 212092 - DNA, 793 bp, Canis familiaris; identical to SEQ ID NO: 1985

SEQ ID NO: 212093 - DNA, 799 bp, Canis familiaris; identical to SEQ ID NO: 1986

SEQ ID NO: 212094 - DNA, 647 bp, Canis familiaris; identical to SEQ ID NO: 1987

SEQ ID NO: 212095 - DNA, 691 bp, Canis familiaris; identical to SEQ ID NO: 1988

SEQ ID NO: 212096 - DNA, 691 bp, Canis familiaris; identical to SEQ ID NO: 1989

SEQ ID NO: 212097 - DNA, 591 bp, Canis familiaris; identical to SEQ ID NO: 1990

SEQ ID NO: 212098 - DNA, 624 bp, Canis familiaris; identical to SEQ ID NO: 1991

SEQ ID NO: 212099 - DNA, 622 bp, Canis familiaris; identical to SEQ ID NO: 1992

SEQ ID NO: 212100 - DNA, 625 bp, Canis familiaris; identical to SEQ ID NO: 1993

SEQ ID NO: 212101 - DNA, 699 bp, Canis familiaris; identical to SEQ ID NO: 1994

SEQ ID NO: 212102 - DNA, 631 bp, Canis familiaris; identical to SEQ ID NO: 1995

SEQ ID NO: 212103 - DNA, 711 bp, Canis familiaris; identical to SEQ ID NO: 1996

SEQ ID NO: 212104 - DNA, 470 bp, Canis familiaris; identical to SEQ ID NO: 1997

SEQ ID NO: 212105 - DNA, 600 bp, Canis familiaris
gaagcagaagcagcagacagccaagcaaggggcggcaggagatcagccggggggcaaccccagcccggccgggggcgcacctgcatccaagtcctgctgcatccagtaacgctgcctggcatcagctgcaccgaatggtaccacccttcctggaaagagaccacccaagccagcagaaaaccaaaaccctgcttgtgaagtaaaatagtaatcggatttgaaagctgggagagaatttagcttactttcatctagtggtttttgaacattttttcagttttgaatactttttactgagctaaaaccaacattctagctttaatagacatcaattaaacatttaattaaggccaarwtcatctgcttgcttagaatcattttcactcttatacttccattttatgatttcttataacaattgtctagcatcctcaaaagtagagaattgttcagtgaatccctcctcctcatcacccagattccaatatcagggttttgccccatttgcttcatccattcttttacatttctttcgcatttttttcttagctgaagtgaagtattttctttattaaattgatggtcttttttcttttttta

SEQ ID NO: 212106 - DNA, 723 bp, Canis familiaris; identical to SEQ ID NO: 1999

SEQ ID NO: 212107 - DNA, 631 bp, Canis familiaris; identical to SEQ ID NO: 2000

SEQ ID NO: 212108 - DNA, 652 bp, Canis familiaris; identical to SEQ ID NO: 2001

SEQ ID NO: 212109 - DNA, 617 bp, Canis familiaris; identical to SEQ ID NO: 2002

SEQ ID NO: 212110 - DNA, 617 bp, Canis familiaris; identical to SEQ ID NO: 2003

SEQ ID NO: 212111 - DNA, 704 bp, Canis familiaris; identical to SEQ ID NO: 2004

SEQ ID NO: 212112 - DNA, 1005 bp, Canis familiaris; identical to SEQ ID NO: 2005

SEQ ID NO: 212113 - DNA, 757 bp, Canis familiaris; identical to SEQ ID NO: 2006
  misc_feature (59)..(60): n is a, c, g, or t
  misc_feature (152)..(152): n is a, c, g, or t

SEQ ID NO: 212114 - DNA, 654 bp, Canis familiaris; identical to SEQ ID NO: 2007

SEQ ID NO: 212115 - DNA, 691 bp, Canis familiaris; identical to SEQ ID NO: 2008

SEQ ID NO: 212116 - DNA, 628 bp, Canis familiaris; identical to SEQ ID NO: 2009

SEQ ID NO: 212117 - DNA, 711 bp, Canis familiaris; identical to SEQ ID NO: 2010

SEQ ID NO: 212118 - DNA, 679 bp, Canis familiaris; identical to SEQ ID NO: 2011

SEQ ID NO: 212119 - DNA, 636 bp, Canis familiaris; identical to SEQ ID NO: 2012

SEQ ID NO: 212120 - DNA, 696 bp, Canis familiaris; identical to SEQ ID NO: 2013

SEQ ID NO: 212121 - DNA, 688 bp, Canis familiaris; identical to SEQ ID NO: 2014

SEQ ID NO: 212122 - DNA, 486 bp, Canis familiaris; identical to SEQ ID NO: 2015

SEQ ID NO: 212123 - DNA, 628 bp, Canis familiaris; identical to SEQ ID NO: 2016

SEQ ID NO: 212124 - DNA, 654 bp, Canis familiaris; identical to SEQ ID NO: 2017
  misc_feature (11)..(11): n is a, c, g, or t

SEQ ID NO: 212125 - DNA, 709 bp, Canis familiaris; identical to SEQ ID NO: 2018

SEQ ID NO: 212126 - DNA, 699 bp, Canis familiaris; identical to SEQ ID NO: 2019

SEQ ID NO: 212127 - DNA, 627 bp, Canis familiaris; identical to SEQ ID NO: 2020

SEQ ID NO: 212128 - DNA, 689 bp, Canis familiaris; identical to SEQ ID NO: 2021

SEQ ID NO: 212129 - DNA, 622 bp, Canis familiaris; identical to SEQ ID NO: 2022

SEQ ID NO: 212130 - DNA, 662 bp, Canis familiaris; identical to SEQ ID NO: 2023

SEQ ID NO: 212131 - DNA, 607 bp, Canis familiaris; identical to SEQ ID NO: 2024

SEQ ID NO: 212132 - DNA, 482 bp, Canis familiaris; identical to SEQ ID NO: 2025

SEQ ID NO: 212133 - DNA, 600 bp, Canis familiaris
gggagggtgaagayyttctttcaaatgaaggacaagctggacaacatactgctgaccgggtccctgctggaggactttaagagttacctgggttgccaagccctgtcggagatgatccagttttacttggaggaggtgatgccccgggctgagaaccacgacccagacatcaagaaccacgtgaactccctgggagagaagctcaagaccctcaggctgagactgaggctgcgacgctgtcaccgatttctkccctgtgagaataagagcaaggcggtggagcaggtgaagagcgcatttagtaagctccaggagaaaggtgtctacaaagccatgagtgagtttgacatcttcatcaactacatagaaacctacatgacaatgaggatgaaaatctgaaacgtgctggagaacaaaacacccaggatggcaactcttctcgactctaggacatgaattggagatctgcaaaataccatcccgagatgtaggagagccgaccaactgcttggagaaccccgtcatacctctctcttagaatatttattactctgatacctcaactcccatttgtatttatttactgagcttctctgtgaa

SEQ ID NO: 212134 - DNA, 660 bp, Canis familiaris; identical to SEQ ID NO: 2027
  misc_feature (57)..(57): n is a, c, g, or t

SEQ ID NO: 212135 - DNA, 631 bp, Canis familiaris; identical to SEQ ID NO: 2028

SEQ ID NO: 212136 - DNA, 767 bp, Canis familiaris; identical to SEQ ID NO: 2029

SEQ ID NO: 212137 - DNA, 592 bp, Canis familiaris; identical to SEQ ID NO: 2030

SEQ ID NO: 212138 - DNA, 654 bp, Canis familiaris; identical to SEQ ID NO: 2031

SEQ ID NO: 212139 - DNA, 734 bp, Canis familiaris; identical to SEQ ID NO: 2032
  misc_feature (129)..(129): n is a, c, g, or t

SEQ ID NO: 212140 - DNA, 676 bp, Canis familiaris; identical to SEQ ID NO: 2033

SEQ ID NO: 212141 - DNA, 704 bp, Canis familiaris; identical to SEQ ID NO: 2034

SEQ ID NO: 212142 - DNA, 359 bp, Canis familiaris; identical to SEQ ID NO: 2035

SEQ ID NO: 212143 - DNA, 621 bp, Canis familiaris; identical to SEQ ID NO: 2036

SEQ ID NO: 212144 - DNA, 614 bp, Canis familiaris; identical to SEQ ID NO: 2037
  misc_feature (112)..(112): n is a, c, g, or t

SEQ ID NO: 212145 - DNA, 600 bp, Canis familiaris
gggactagggacagaggacttggcttcctggggttggatgttgtaatcctagtgcacaaacttttggcttcagtccctcctgttgcttttggtatttctctgtcccttcacttcccaatacactagtgtgcgtgagcacacacacacacacacacacacacacacacacacacacacggctgctctctgggagtcccaggacaacgacttggatgggattctgaactgggaggaggaacaggagaaggagcaaaggtggagaccagttcctctctctggtccggtctgtgtgggcttcctgtaagcggcttcccgggacgtggggggcacctgaggcatggagctgagctgagcacaggagcccagctggggactgaggtgagcaggaagcagagggtgggctgtgtctttgtggtcctttagaggggcctctgaggggctgcaggggtgagtccagggaggtcacttcacagaattgtgtgtgtctgggtacagaagaccagggtgggaagaaagtctaggacgaggggtatcaccccaccccaccaagcctcccacagcttctcagttgctcaggacgaggctgggaagtcagagtgg

SEQ ID NO: 212146 - DNA, 551 bp, Canis familiaris; identical to SEQ ID NO: 2039

SEQ ID NO: 212147 - DNA, 694 bp, Canis familiaris; identical to SEQ ID NO: 2040

SEQ ID NO: 212148 - DNA, 663 bp, Canis familiaris; identical to SEQ ID NO: 2041

SEQ ID NO: 212149 - DNA, 600 bp, Canis familiaris
gtcatatctcttttatttcagtgtaaagcttttcaatggaaatgaggtgtgcctggaccccaaggaaaaatgggtacaaaaggttgtgcagatatttctaaagaagtaagtttttttttttttaactttagattcttcatttaccctgagacatatagtctaaatgttagcctataaatttcctcttgctgctggaagtctactcttttggaaatttgcctctttaattaaaaaacaaaaaaatagtagcaatagtgagtttgttgtactcataactggggaagaccgatacatgtcagtttgtccagtgaagtctgggcttatgcctgtgccctgtatcagtgatatggttccctttcattctcagaagtgttctggtttagatgataatttatctttctactcataattgaaaattagagtatttctaacacatgaatatctgagattatttatytccatagtatatatattttcaagaatgatactttcctccttattagacatttaattaaaatttgttttattttatttattttcagggctgagaaacaagatccgtgaaacaacaaacacattatctgtggtatccaagaattc

SEQ ID NO: 212150 - DNA, 695 bp, Canis familiaris; identical to SEQ ID NO: 2043

SEQ ID NO: 212151 - DNA, 896 bp, Canis familiaris; identical to SEQ ID NO: 2044

SEQ ID NO: 212152 - DNA, 675 bp, Canis familiaris; identical to SEQ ID NO: 2045

SEQ ID NO: 212153 - DNA, 688 bp, Canis familiaris; identical to SEQ ID NO: 2046

SEQ ID NO: 212154 - DNA, 736 bp, Canis familiaris; identical to SEQ ID NO: 2047

SEQ ID NO: 212155 - DNA, 668 bp, Canis familiaris; identical to SEQ ID NO: 2048

SEQ ID NO: 212156 - DNA, 524 bp, Canis familiaris; identical to SEQ ID NO: 2049

SEQ ID NO: 212157 - DNA, 593 bp, Canis familiaris; identical to SEQ ID NO: 2050

SEQ ID NO: 212158 - DNA, 642 bp, Canis familiaris; identical to SEQ ID NO: 2051

SEQ ID NO: 212159 - DNA, 642 bp, Canis familiaris; identical to SEQ ID NO: 2052

SEQ ID NO: 212160 - DNA, 669 bp, Canis familiaris; identical to SEQ ID NO: 2053

SEQ ID NO: 212161 - DNA, 690 bp, Canis familiaris; identical to SEQ ID NO: 2054

SEQ ID NO: 212162 - DNA, 701 bp, Canis familiaris; identical to SEQ ID NO: 2055

SEQ ID NO: 212163 - DNA, 697 bp, Canis familiaris; identical to SEQ ID NO: 2056

SEQ ID NO: 212164 - DNA, 538 bp, Canis familiaris; identical to SEQ ID NO: 2057

SEQ ID NO: 212165 - DNA, 267 bp, Canis familiaris; identical to SEQ ID NO: 2058

SEQ ID NO: 212166 - DNA, 1104 bp, Canis familiaris; identical to SEQ ID NO: 2059

SEQ ID NO: 212167 - DNA, 644 bp, Canis familiaris; identical to SEQ ID NO: 2060

SEQ ID NO: 212168 - DNA, 697 bp, Canis familiaris; identical to SEQ ID NO: 2061

SEQ ID NO: 212169 - DNA, 697 bp, Canis familiaris; identical to SEQ ID NO: 2062

SEQ ID NO: 212170 - DNA, 721 bp, Canis familiaris; identical to SEQ ID NO: 2063

SEQ ID NO: 212171 - DNA, 708 bp, Canis familiaris; identical to SEQ ID NO: 2064

SEQ ID NO: 212172 - DNA, 692 bp, Canis familiaris; identical to SEQ ID NO: 2065

SEQ ID NO: 212173 - DNA, 497 bp, Canis familiaris; identical to SEQ ID NO: 2066

SEQ ID NO: 212174 - DNA, 638 bp, Canis familiaris; identical to SEQ ID NO: 2067
  misc_feature (12)..(12): n is a, c, g, or t

SEQ ID NO: 212175 - DNA, 612 bp, Canis familiaris; identical to SEQ ID NO: 2068

SEQ ID NO: 212176 - DNA, 612 bp, Canis familiaris; identical to SEQ ID NO: 2069

SEQ ID NO: 212177 - DNA, 681 bp, Canis familiaris; identical to SEQ ID NO: 2070

SEQ ID NO: 212178 - DNA, 684 bp, Canis familiaris; identical to SEQ ID NO: 2071

SEQ ID NO: 212179 - DNA, 763 bp, Canis familiaris; identical to SEQ ID NO: 2072
  misc_feature (28)..(28): n is a, c, g, or t

SEQ ID NO: 212180 - DNA, 588 bp, Canis familiaris; identical to SEQ ID NO: 2073

SEQ ID NO: 212181 - DNA, 630 bp, Canis familiaris; identical to SEQ ID NO: 2074

SEQ ID NO: 212182 - DNA, 590 bp, Canis familiaris; identical to SEQ ID NO: 2075

SEQ ID NO: 212183 - DNA, 528 bp, Canis familiaris; identical to SEQ ID NO: 2076

SEQ ID NO: 212184 - DNA, 706 bp, Canis familiaris; identical to SEQ ID NO: 2077

SEQ ID NO: 212185 - DNA, 663 bp, Canis familiaris; identical to SEQ ID NO: 2078

SEQ ID NO: 212186 - DNA, 618 bp, Canis familiaris; identical to SEQ ID NO: 2079

SEQ ID NO: 212187 - DNA, 631 bp, Canis familiaris; identical to SEQ ID NO: 2080

SEQ ID NO: 212188 - DNA, 666 bp, Canis familiaris; identical to SEQ ID NO: 2081

SEQ ID NO: 212189 - DNA, 680 bp, Canis familiaris; identical to SEQ ID NO: 2082

SEQ ID NO: 212190 - DNA, 648 bp, Canis familiaris; identical to SEQ ID NO: 2083

SEQ ID NO: 212191 - DNA, 526 bp, Canis familiaris; identical to SEQ ID NO: 2084

SEQ ID NO: 212192 - DNA, 713 bp, Canis familiaris; identical to SEQ ID NO: 2085

SEQ ID NO: 212193 - DNA, 611 bp, Canis familiaris; identical to SEQ ID NO: 2086

SEQ ID NO: 212194 - DNA, 639 bp, Canis familiaris; identical to SEQ ID NO: 2087

SEQ ID NO: 212195 - DNA, 628 bp, Canis familiaris; identical to SEQ ID NO: 2088

SEQ ID NO: 212196 - DNA, 617 bp, Canis familiaris; identical to SEQ ID NO: 2089

SEQ ID NO: 212197 - DNA, 617 bp, Canis familiaris; identical to SEQ ID NO: 2090

SEQ ID NO: 212198 - DNA, 755 bp, Canis familiaris; identical to SEQ ID NO: 2091
  misc_feature (382)..(382): n is a, c, g, or t

SEQ ID NO: 212199 - DNA, 749 bp, Canis familiaris; identical to SEQ ID NO: 2092

SEQ ID NO: 212200 - DNA, 693 bp, Canis familiaris; identical to SEQ ID NO: 2093

SEQ ID NO: 212201 - DNA, 619 bp, Canis familiaris; identical to SEQ ID NO: 2094

SEQ ID NO: 212202 - DNA, 617 bp, Canis familiaris; identical to SEQ ID NO: 2095

SEQ ID NO: 212203 - DNA, 647 bp, Canis familiaris; identical to SEQ ID NO: 2096

SEQ ID NO: 212204 - DNA, 1302 bp, Canis familiaris; identical to SEQ ID NO: 2097

SEQ ID NO: 212205 - DNA, 652 bp, Canis familiaris; identical to SEQ ID NO: 2098

SEQ ID NO: 212206 - DNA, 631 bp, Canis familiaris; identical to SEQ ID NO: 2099
  misc_feature (103)..(103): n is a, c, g, or t

SEQ ID NO: 212207 - DNA, 633 bp, Canis familiaris; identical to SEQ ID NO: 2100

SEQ ID NO: 212208 - DNA, 717 bp, Canis familiaris; identical to SEQ ID NO: 2101

SEQ ID NO: 212209 - DNA, 699 bp, Canis familiaris; identical to SEQ ID NO: 2102

SEQ ID NO: 212210 - DNA, 537 bp, Canis familiaris; identical to SEQ ID NO: 2103

SEQ ID NO: 212211 - DNA, 639 bp, Canis familiaris; identical to SEQ ID NO: 2104

SEQ ID NO: 212212 - DNA, 721 bp, Canis familiaris; identical to SEQ ID NO: 2105

SEQ ID NO: 212213 - DNA, 632 bp, Canis familiaris; identical to SEQ ID NO: 2106

SEQ ID NO: 212214 - DNA, 763 bp, Canis familiaris; identical to SEQ ID NO: 2107

SEQ ID NO: 212215 - DNA, 865 bp, Canis familiaris; identical to SEQ ID NO: 2108

SEQ ID NO: 212216 - DNA, 682 bp, Canis familiaris; identical to SEQ ID NO: 2109
  misc_feature (153)..(153): n is a, c, g, or t
  misc_feature (196)..(197): n is a, c, g, or t
  misc_feature (213)..(214): n is a, c, g, or t
  misc_feature (216)..(216): n is a, c, g, or t
  misc_feature (228)..(228): n is a, c, g, or t
  misc_feature (230)..(230): n is a, c, g, or t
  misc_feature (241)..(241): n is a, c, g, or t

SEQ ID NO: 212217 - DNA, 679 bp, Canis familiaris; identical to SEQ ID NO: 2110

SEQ ID NO: 212218 - DNA, 647 bp, Canis familiaris; identical to SEQ ID NO: 2111

SEQ ID NO: 212219 - DNA, 595 bp, Canis familiaris; identical to SEQ ID NO: 2112

SEQ ID NO: 212220 - DNA, 707 bp, Canis familiaris; identical to SEQ ID NO: 2113

SEQ ID NO: 212221 - DNA, 707 bp, Canis familiaris; identical to SEQ ID NO: 2114

SEQ ID NO: 212222 - DNA, 677 bp, Canis familiaris; identical to SEQ ID NO: 2115

SEQ ID NO: 212223 - DNA, 688 bp, Canis familiaris; identical to SEQ ID NO: 2116

SEQ ID NO: 212224 - DNA, 653 bp, Canis familiaris; identical to SEQ ID NO: 2117

SEQ ID NO: 212225 - DNA, 602 bp, Canis familiaris; identical to SEQ ID NO: 2118

SEQ ID NO: 212226 - DNA, 602 bp, Canis familiaris; identical to SEQ ID NO: 2119

SEQ ID NO: 212227 - DNA, 582 bp, Canis familiaris; identical to SEQ ID NO: 2120

SEQ ID NO: 212228 - DNA, 534 bp, Canis familiaris; identical to SEQ ID NO: 2121

SEQ ID NO: 212229 - DNA, 661 bp, Canis familiaris; identical to SEQ ID NO: 2122

SEQ ID NO: 212230 - DNA, 697 bp, Canis familiaris; identical to SEQ ID NO: 2123

SEQ ID NO: 212231 - DNA, 754 bp, Canis familiaris; identical to SEQ ID NO: 2124

SEQ ID NO: 212232 - DNA, 620 bp, Canis familiaris; identical to SEQ ID NO: 2125

SEQ ID NO: 212233 - DNA, 665 bp, Canis familiaris; identical to SEQ ID NO: 2126

SEQ ID NO: 212234 - DNA, 665 bp, Canis familiaris; identical to SEQ ID NO: 2127

SEQ ID NO: 212235 - DNA, 545 bp, Canis familiaris; identical to SEQ ID NO: 2128

SEQ ID NO: 212236 - DNA, 646 bp, Canis familiaris; identical to SEQ ID NO: 2129

SEQ ID NO: 212237 - DNA, 672 bp, Canis familiaris; identical to SEQ ID NO: 2130

SEQ ID NO: 212238 - DNA, 634 bp, Canis familiaris; identical to SEQ ID NO: 2131

SEQ ID NO: 212239 - DNA, 681 bp, Canis familiaris; identical to SEQ ID NO: 2132
  misc_feature (235)..(235): n is a, c, g, or t

SEQ ID NO: 212240 - DNA, 739 bp, Canis familiaris; identical to SEQ ID NO: 2133

SEQ ID NO: 212241 - DNA, 642 bp, Canis familiaris; identical to SEQ ID NO: 2134

SEQ ID NO: 212242 - DNA, 613 bp, Canis familiaris; identical to SEQ ID NO: 2135

SEQ ID NO: 212243 - DNA, 650 bp, Canis familiaris; identical to SEQ ID NO: 2136

SEQ ID NO: 212244 - DNA, 600 bp, Canis familiaris
ccttcctcctcgtcgcaggggccaccacactcttctgcctgctgcactttggagtgatcggccccccagagggaagagctcccaaatkgcctccaactaatcagccctcttgyccagacagtcaaatcatcttctcgaaccccaagtgacaagccagtagctcatgttgtagcaaaccccgaagctgaggggcagctccagtggctgagccgacgtgccaatgmcctcctggccaaygrcgtggagctgacagacaaccagctgatagtgccgtcagatgggttgtacctcakmtactcccaggtcctcttcaagggccaagggtgcccttccacccatgtgctcctcacccacaccatcagccgcttcgccgtctcctaccagacaaaggtcaacctactctctgccatcaagagcccttgccaaagggagaccccagaggggaccgaggccaagccctggtacgagcccatctacctgggaggggtcttccaactggagaagggtgatcgactcagcgctgagatcaatctgcctaactatctggactttgccgagtcygggcaggtstactttggratcattgccctgtragaattc

SEQ ID NO: 212245 - DNA, 676 bp, Canis familiaris; identical to SEQ ID NO: 2138

SEQ ID NO: 212246 - DNA, 655 bp, Canis familiaris; identical to SEQ ID NO: 2139

SEQ ID NO: 212247 - DNA, 626 bp, Canis familiaris; identical to SEQ ID NO: 2140

SEQ ID NO: 212248 - DNA, 607 bp, Canis familiaris; identical to SEQ ID NO: 2141

SEQ ID NO: 212249 - DNA, 630 bp, Canis familiaris; identical to SEQ ID NO: 2142

SEQ ID NO: 212250 - DNA, 810 bp, Canis familiaris; identical to SEQ ID NO: 2143

SEQ ID NO: 212251 - DNA, 669 bp, Canis familiaris; identical to SEQ ID NO: 2144

SEQ ID NO: 212252 - DNA, 1400 bp, Canis familiaris
agaagaaacacgtgttcaagctgagattaaatgatggcaatgagtacctcttccaagccaaagatgatgaggaaatgaacacatggatccaggccatctcctccgccatctcctctgataaacacgaggtgtccgccagcacccagagcacgccagcatccagccgggcacagaccttgcccaccagcgtcgtcaccatcaccagcgagtctagccccggcaagcgggagaaggacaaagagaaagacaaggagaagcggttcagcatttttggcaaaaagaagtgaactcctttcctttacctcctgcccttctcttaccttttcagtgaaactccagcatgcaagctcagaaccaacacattactctctgtgcctaatgttcttcaatgtggttgatttttttttttttaatttatagagcattttttggggggtgggtgggggaaatacacctaaacactttatctccaagttacaaaagtttgaggtgcagagggaagaccagattttttttaatgaaattatatagattagatctcaatatttaaactgttcctcaattttgtgaggctgcgttggaaataacccgcctctagtgctgttggtatgcaaggcagcggtgcttaaacaatatttcctgtgctcaccagagacaaaaatgtaccaatttcctgacaccattctcttccatttatttccagtggttaccttgagtcttgactattagaagtgcccacgacgggtctaaccttgattaaacagatcgtgtattatgatctcgctgcagcgacagtgcagctccatgttcaatctacagaccaaaccgtttgtatctggcatcacttactaacacatgccctgcggctttttctgcgtcacctgcaaggacagttgagaatgtcggtataccggtataagagaaggaatagaaaattgatactgttttaaataatctgtaatttcagtttttttttttttttttgctgaaatacattatattgtatgtttgagataattctagtacaaagtataataaaactagatgtataataaaccctttaaatcattggtaagtgtacaagtggaactgaagcatttactggacaaagtcatgttactctaatggttacttgctcgtgcgttgccacactgtgttataatttgcttcattaccttgctctttgatacatagtgtgcatttctttgtcactgtaacgattgtaatgacaaaattttcatcttactgcacaatcaaaatggcattgataggaatgaactccagaggccgggcctgagccgagaggtggtcgctccggcctggcgctcagtcgtctgacctgtacctctcaacttttgccctgttaaatatatgctatgtcattaaatgcttttaaatct

SEQ ID NO: 212253 - DNA, 721 bp, Canis familiaris; identical to SEQ ID NO: 2146

SEQ ID NO: 212254 - DNA, 721 bp, Canis familiaris; identical to SEQ ID NO: 2147

SEQ ID NO: 212255 - DNA, 607 bp, Canis familiaris; identical to SEQ ID NO: 2148

SEQ ID NO: 212256 - DNA, 572 bp, Canis familiaris; identical to SEQ ID NO: 2149

SEQ ID NO: 212257 - DNA, 634 bp, Canis familiaris; identical to SEQ ID NO: 2150

SEQ ID NO: 212258 - DNA, 657 bp, Canis familiaris; identical to SEQ ID NO: 2151

SEQ ID NO: 212259 - DNA, 667 bp, Canis familiaris; identical to SEQ ID NO: 2152

SEQ ID NO: 212260 - DNA, 638 bp, Canis familiaris; identical to SEQ ID NO: 2153

SEQ ID NO: 212261 - DNA, 608 bp, Canis familiaris; identical to SEQ ID NO: 2154

SEQ ID NO: 212262 - DNA, 778 bp, Canis familiaris; identical to SEQ ID NO: 2155

SEQ ID NO: 212263 - DNA, 750 bp, Canis familiaris; identical to SEQ ID NO: 2156

SEQ ID NO: 212264 - DNA, 717 bp, Canis familiaris; identical to SEQ ID NO: 2157

SEQ ID NO: 212265 - DNA, 719 bp, Canis familiaris; identical to SEQ ID NO: 2158

SEQ ID NO: 212266 - DNA, 719 bp, Canis familiaris; identical to SEQ ID NO: 2159

SEQ ID NO: 212267 - DNA, 710 bp, Canis familiaris; identical to SEQ ID NO: 2160

SEQ ID NO: 212268 - DNA, 710 bp, Canis familiaris; identical to SEQ ID NO: 2161

SEQ ID NO: 212269 - DNA, 708 bp, Canis familiaris; identical to SEQ ID NO: 2162

SEQ ID NO: 212270 - DNA, 624 bp, Canis familiaris; identical to SEQ ID NO: 2163

SEQ ID NO: 212271 - DNA, 645 bp, Canis familiaris; identical to SEQ ID NO: 2164

SEQ ID NO: 212272 - DNA, 1400 bp, Canis familiaris
tcaaaaaggatacttactgggaatgaacttttctaagtaggggagggatggctgtatggtttaccaggtcctgtgtccaatgtcagttatgcgagtcaccaagctggaggccattcaaggagtggaattattcatgaaactctgctgagttcttcccaatgaggggaaagtattcccttctttcctgcccttcccaaacggaagggactgctctgggaaggattctcccaccactcctcaactgaccatagacttttagaaagtaaaatgtaagactagcaactagcaagggtgctcatagtcttactacagaacactaaagagccaggtaggaaagagtggagcatggttgacattatggagaggatttttaaaacaccacgcttatagatcatctttaaggacgaatttaaaatagagaggttcattttgtttaacctgaaatactttttgtcttcagttcaaaatcatcccccaaggaagtctgcttatcaaaatacaaggtcacttctcatatctattttgaagaagtcaaatgaatgagctctctctccctctctctctcaatagaggtccaggagctgggtgggtggtctcttatttgaaaaggtttttgactataatcaaaagttcttaggatgagagaaacaagatatttctttgtgttggaattccacttcccaaatcattgaaagcctttagctggaattgggttcagttttattttgtttgtgtccctgagagaaatggtagaagatgaatcagtatagagacgctgtcaatgtggttccaagagaaaaccagcaggggcattagtttcaggcgaggcagctcccaggtttagaggagattaatttttttaccccctaaggagtattcactcaaagacatggactgggagctgtcagtaccagctgtgcttgagtttctgaccgaaaatggtgaagaatggacttaattatgctaacagattgaaaatctagacatacactctccaatacacaattagagacgttttctatatagatcatgagcgttacatgtgtacaaaaaaaagttaacgttaggctgtggtgaagtaaccgtttaatgccgaggctctatttgggaaatacattacaaaagttaatatccgtggctgtcatctcatgacaccagtagagcaaaaattaatcacgtcaaattaattctgttatacagtgtgatcttttttttttatactaaccatttcttatggaaagcaagtcctcttgggacgatcctctctycagcccatcacaggctctgtatacgcatgcacccagtgtggactgagaagcattactttgtagatgtattttcaataaagaaaagaaattagttttacaytaaaaaaaaaaaaaaaaaaaaaaaaaaaaaaa

SEQ ID NO: 212273 - DNA, 763 bp, Canis familiaris; identical to SEQ ID NO: 2166
  misc_feature (16)..(16): n is a, c, g, or t

SEQ ID NO: 212274 - DNA, 763 bp, Canis familiaris; identical to SEQ ID NO: 2167
  misc_feature (16)..(16): n is a, c, g, or t

SEQ ID NO: 212275 - DNA, 721 bp, Canis familiaris; identical to SEQ ID NO: 2168
  misc_feature (7)..(7): n is a, c, g, or t

SEQ ID NO: 212276 - DNA, 721 bp, Canis familiaris; identical to SEQ ID NO: 2169
  misc_feature (7)..(7): n is a, c, g, or t

SEQ ID NO: 212277 - DNA, 658 bp, Canis familiaris; identical to SEQ ID NO: 2170

SEQ ID NO: 212278 - DNA, 658 bp, Canis familiaris; identical to SEQ ID NO: 2171

SEQ ID NO: 212279 - DNA, 657 bp, Canis familiaris; identical to SEQ ID NO: 2172

SEQ ID NO: 212280 - DNA, 657 bp, Canis familiaris; identical to SEQ ID NO: 2173

SEQ ID NO: 212281 - DNA, 748 bp, Canis familiaris; identical to SEQ ID NO: 2174

SEQ ID NO: 212282 - DNA, 611 bp, Canis familiaris; identical to SEQ ID NO: 2175

SEQ ID NO: 212283 - DNA, 649 bp, Canis familiaris; identical to SEQ ID NO: 2176
  misc_feature (270)..(270): n is a, c, g, or t

SEQ ID NO: 212284 - DNA, 630 bp, Canis familiaris; identical to SEQ ID NO: 2177

SEQ ID NO: 212285 - DNA, 620 bp, Canis familiaris; identical to SEQ ID NO: 2178

SEQ ID NO: 212286 - DNA, 608 bp, Canis familiaris; identical to SEQ ID NO: 2179

SEQ ID NO: 212287 - DNA, 608 bp, Canis familiaris; identical to SEQ ID NO: 2180

SEQ ID NO: 212288 - DNA, 637 bp, Canis familiaris; identical to SEQ ID NO: 2181

SEQ ID NO: 212289 - DNA, 675 bp, Canis familiaris; identical to SEQ ID NO: 2182

SEQ ID NO: 212290 - DNA, 1400 bp, Canis familiaris
agaaacaactttgaaagaaaacagaccagcacaattctgcaatcagagttttaagatgggtgtggggttttgtgggaaggttcttttttcaatgtactgtattgggacactggtaactcctaccccagtgttcagtatagagctagatatatatatatgtatatatttattattttcatataagttgccagacagagatcagaattgactgtcaatgtgaaataaagagctttccttgtactgaataataactatgatctcaatccagatctgctttggggcttatccaaactcctctctcaggagcacaagaatgaaatatcatgttgtctgattgttccacgtctgtgtgtcagcctcaaagcagatatgcattatggagatactccaaggtggcatcaccatttatctacaacccccagattctgctgctatgagggaatccatatcagctctatatacgattgtatacaaaggtgtcactcatacaaggctggatgtgtttttatccaattggaaggcttcattcttccaagatcaactagacccacttaaaaatgacaggactttgcccttttgtacccattagggcctaaacaacagtggcaagctaccagctaagttgtattttaatatggatctgatggactgaacaagtcacattggccagtgtcttcttgcaaaggaagtcccacaacatgagatcttggttatgagtggttcagggaaattcttccattgtatgaaactcatctcctcctcaagggaggatggttccaactagtagtctagtaatctcagccctggtcattacaatccatttcccttcttatgctaatttatggaaatagtttattaaaatctgtgcttcagcactcatcttaaaaataacatttaacataaaaacttgtatttacacggagatccaaaatagtcacgtttctgcagtatagccaatttaaacctgtgcttttttatatttaagaaaaccagaaactgtgccaaagatggtggaaaagtaaacaaatgttcaatgttgactacctgtaccctgaaagctataagggaatgatcctagattgtcgagtacacatcataaacgtggaccagtgattcaatgtgagtcttcaaagggaaatattgatgttgtgcagtggaaataaatctaaatatcgatgcagttgaatccataatttgtcatgggctgaaaggtcctacccccttggcagtttgctcagatctaaggcacgggagttggcagagctgttcgtgaactgcaggtcatccttattttggagtgagtttgtaacgagcctcttaacacactgtgctgttaactcattaaagagaacgatgttccatttcagtctcaataaatacttctgcccttcctccttccc

SEQ ID NO: 212291 - DNA, 709 bp, Canis familiaris; identical to SEQ ID NO: 2184

SEQ ID NO: 212292 - DNA, 683 bp, Canis familiaris; identical to SEQ ID NO: 2185

SEQ ID NO: 212293 - DNA, 710 bp, Canis familiaris; identical to SEQ ID NO: 2186
  misc_feature (2)..(2): n is a, c, g, or t

SEQ ID NO: 212294 - DNA, 748 bp, Canis familiaris; identical to SEQ ID NO: 2187

SEQ ID NO: 212295 - DNA, 600 bp, Canis familiaris
aaatatacaaagacttttattatccaagagtaaattccaaattattcagccatgtagatatataaattccttctctgtaattaattcacctgcttactacatacactaattgggaagtgatccttcagtttgcaaaagggagggataggatgtgtagttgtacagatatacatttatttacatacgcaaaatgcacatatggtatctgaaagttgcaaagagaaacaaagtataatgcacaataaatatttgaatagtgacttttttccactttaaatatgaatctgctaggaacatttagtctttctacaacaaaaataagcatgtacatatgctaatatcatcatcacatagacacgatcatcatcctatcattcattccataaggtcattccagtttagatacaactaacattaggaagttatttttctccctaaaaggaattattttgaatccttaattttgaaatatgaaatctttagttatttacaacttaattgtaaatgcactggtatttactattaacttatttgtattgagttttttgagactatttattctagctacatttattttagtagatatagattgaagttttt

SEQ ID NO: 212296 - DNA, 639 bp, Canis familiaris; identical to SEQ ID NO: 2189

SEQ ID NO: 212297 - DNA, 630 bp, Canis familiaris; identical to SEQ ID NO: 2190

SEQ ID NO: 212298 - DNA, 673 bp, Canis familiaris; identical to SEQ ID NO: 2191

SEQ ID NO: 212299 - DNA, 712 bp, Canis familiaris; identical to SEQ ID NO: 2192

SEQ ID NO: 212300 - DNA, 712 bp, Canis familiaris; identical to SEQ ID NO: 2193

SEQ ID NO: 212301 - DNA, 628 bp, Canis familiaris; identical to SEQ ID NO: 2194

SEQ ID NO: 212302 - DNA, 558 bp, Canis familiaris; identical to SEQ ID NO: 2195

SEQ ID NO: 212303 - DNA, 600 bp, Canis familiaris
cactccagcatcactacgcggattttggcaggctgcaccacaggagccatggcagtatcatgtgcccagcccacagatgtggtgaaggtccgatttcaggccagcatacaccttggggcggggagcaacaggaagtacagtgggacaatggatgcctacaggaccatcgccagggaagaaggggtcaggggcctatggaaaggaacattgcccaacatcacaaggaatgccatcgtcaactgtgctgagatggtgacctatgacatcatcaaggagaagctgctagactatcatctgctcactgacaatttcccctgccacttgatttctgcctttggagccggtttctgtgccacagtggtggcctccccagtggatgtggtgaagacccggtacatgaactcgcccccaggccaatactgcagccccctggactgtatgctgaagatggtgacccaagagggccccacagccttctataagggatttacaccatcctttttgcgtttgggaacctggaatgtggtgatgtttgtgacctatgagcagctgaaacgggccttgatgaaagtccagatgctacgggaatctccattctga

SEQ ID NO: 212304 - DNA, 715 bp, Canis familiaris; identical to SEQ ID NO: 2197

SEQ ID NO: 212305 - DNA, 684 bp, Canis familiaris; identical to SEQ ID NO: 2198

SEQ ID NO: 212306 - DNA, 600 bp, Canis familiaris
tctgagcatgctggcatcgggagccgcctcctggcaggcagcaccacaggtgccttggctgtggctgtagcccagcccacagatgtagtaaaggtccggttccaggctcaggcccgggctggaagtggccggagataccaaagcactgttgatgcctacaagaccatcgcccgagaggaagggttccgaggactctggaaagggacctctcccaatgttgctcgtaatgccattgtcaactgtgctgagctggtgacctaygatctcatcaaggacgccctcctgaaggccaacctcatgacagatgacctcccttgccacttcacttctgccttcggggcaggcttctgcaccaccgtcatcgcctcccccgtcgatgtcgtcaagacgagatatatgaactctgccctaggccagtacagcagcgctggccactgtgccctcaccatgctccagaaggagggtccccgagccttctacaaagggttcatgccttcctttctccgtttgggttcctggaacgtggtgatgtttgtcacctatgagcagctcaaacgggccctcatggctgcctgcacttcccgggaggctcccttttaa

SEQ ID NO: 212307 - DNA, 639 bp, Canis familiaris; identical to SEQ ID NO: 2200

SEQ ID NO: 212308 - DNA, 578 bp, Canis familiaris; identical to SEQ ID NO: 2201

SEQ ID NO: 212309 - DNA, 807 bp, Canis familiaris; identical to SEQ ID NO: 2202

SEQ ID NO: 212310 - DNA, 678 bp, Canis familiaris; identical to SEQ ID NO: 2203

SEQ ID NO: 212311 - DNA, 685 bp, Canis familiaris; identical to SEQ ID NO: 2204

SEQ ID NO: 212312 - DNA, 645 bp, Canis familiaris; identical to SEQ ID NO: 2205

SEQ ID NO: 212313 - DNA, 689 bp, Canis familiaris; identical to SEQ ID NO: 2206

SEQ ID NO: 212314 - DNA, 687 bp, Canis familiaris; identical to SEQ ID NO: 2207

SEQ ID NO: 212315 - DNA, 656 bp, Canis familiaris; identical to SEQ ID NO: 2208

SEQ ID NO: 212316 - DNA, 656 bp, Canis familiaris; identical to SEQ ID NO: 2209

SEQ ID NO: 212317 - DNA, 563 bp, Canis familiaris; identical to SEQ ID NO: 2210

SEQ ID NO: 212318 - DNA, 689 bp, Canis familiaris; identical to SEQ ID NO: 2211

SEQ ID NO: 212319 - DNA, 673 bp, Canis familiaris; identical to SEQ ID NO: 2212

SEQ ID NO: 212320 - DNA, 576 bp, Canis familiaris; identical to SEQ ID NO: 2213

SEQ ID NO: 212321 - DNA, 621 bp, Canis familiaris; identical to SEQ ID NO: 2214

SEQ ID NO: 212322 - DNA, 710 bp, Canis familiaris; identical to SEQ ID NO: 2215

SEQ ID NO: 212323 - DNA, 694 bp, Canis familiaris; identical to SEQ ID NO: 2216

SEQ ID NO: 212324 - DNA, 637 bp, Canis familiaris; identical to SEQ ID NO: 2217

SEQ ID NO: 212325 - DNA, 694 bp, Canis familiaris; identical to SEQ ID NO: 2218

SEQ ID NO: 212326 - DNA, 712 bp, Canis familiaris; identical to SEQ ID NO: 2219

SEQ ID NO: 212327 - DNA, 606 bp, Canis familiaris; identical to SEQ ID NO: 2220

SEQ ID NO: 212328 - DNA, 647 bp, Canis familiaris; identical to SEQ ID NO: 2221

SEQ ID NO: 212329 - DNA, 647 bp, Canis familiaris; identical to SEQ ID NO: 2222

SEQ ID NO: 212330 - DNA, 530 bp, Canis familiaris; identical to SEQ ID NO: 2223

SEQ ID NO: 212331 - DNA, 884 bp, Canis familiaris; identical to SEQ ID NO: 2224
  misc_feature (561)..(561): n is a, c, g, or t

SEQ ID NO: 212332 - DNA, 731 bp, Canis familiaris; identical to SEQ ID NO: 2225

SEQ ID NO: 212333 - DNA, 600 bp, Canis familiaris
accagtaccaggagctgcctcgctgccctgcccccacccctagcctcctgaacatccccctctccagcccatgccggcggccccggggcgacgtggagggcaggctggatgctctccagaggcaactcaacaggctggagacccggctgagtgcagacatggccactgtcctgcagctgctgcagaggcagatgacgctgatcccacctgcctacagtgctgtgaccaccccggggcctgggcccacctccacctcctctctgctgcctgtcagccccatccccaccctcaccctggactcgctttctcaggtttcccagttcatggcgttcgaggagctccccccgggggccccagagctcccccaagacggcccccctcgacgcctctccctaccgggccagctgggggccctcacctcccagcctctgcacagacatggctcagacccaggcagttagtggggctgcctggtgtggacatgtggctcacccagggttcagcgcactgcctgggcccctcccctcagaggccctgcccgggaggccctggccgagacaggggagaggaccaaggaccgtgaaggcatagcccctcccc

SEQ ID NO: 212334 - DNA, 627 bp, Canis familiaris; identical to SEQ ID NO: 2227

SEQ ID NO: 212335 - DNA, 669 bp, Canis familiaris; identical to SEQ ID NO: 2228

SEQ ID NO: 212336 - DNA, 561 bp, Canis familiaris; identical to SEQ ID NO: 2229

SEQ ID NO: 212337 - DNA, 664 bp, Canis familiaris; identical to SEQ ID NO: 2230

SEQ ID NO: 212338 - DNA, 682 bp, Canis familiaris; identical to SEQ ID NO: 2231

SEQ ID NO: 212339 - DNA, 600 bp, Canis familiaris
agtatggcttccaaaatgcgctcttagttcgttacaccaagaaagcaccccaagtgtcaactccaactctcgtggaggtctcaagaaaactaggaaaagtgggcaccaaatgttgtaagaaacctgaatcagagagaatgtcctgtgctgawgactttctgtccgtggtcctgaaccggttgtgtgtgttgcacgagaagaccccagtgagcgagagagttaccaaatgctgctcagagtccttggtgaacagacgaccatgcttttctggtctggaagtcgatgagacctatgttcccaaagagtttaatgctgaaacattcactttccatgcagatttatgcacacttcctgaggctgagaaacaagtcaagaaacaaactgcacttgttgaactgctgaaacacaagcccaaggcaacagatgaacaactgaaaactgttatgggagattttggagcctttgtagagaagtgctgcgcagctgaaaataaagagggctgcttttctgaagagggtccaaaactcgttgctgctgctcaagctgccttagtctgaaagaacacaataacaaacatctcagcctaccctgagagtcgac

SEQ ID NO: 212340 - DNA, 657 bp, Canis familiaris; identical to SEQ ID NO: 2233

SEQ ID NO: 212341 - DNA, 582 bp, Canis familiaris; identical to SEQ ID NO: 2234

SEQ ID NO: 212342 - DNA, 654 bp, Canis familiaris; identical to SEQ ID NO: 2235

SEQ ID NO: 212343 - DNA, 755 bp, Canis familiaris; identical to SEQ ID NO: 2236

SEQ ID NO: 212344 - DNA, 615 bp, Canis familiaris; identical to SEQ ID NO: 2237

SEQ ID NO: 212345 - DNA, 770 bp, Canis familiaris; identical to SEQ ID NO: 2238

SEQ ID NO: 212346 - DNA, 652 bp, Canis familiaris; identical to SEQ ID NO: 2239

SEQ ID NO: 212347 - DNA, 537 bp, Canis familiaris; identical to SEQ ID NO: 2240

SEQ ID NO: 212348 - DNA, 684 bp, Canis familiaris; identical to SEQ ID NO: 2241

SEQ ID NO: 212349 - DNA, 684 bp, Canis familiaris; identical to SEQ ID NO: 2242

SEQ ID NO: 212350 - DNA, 668 bp, Canis familiaris; identical to SEQ ID NO: 2243

SEQ ID NO: 212351 - DNA, 668 bp, Canis familiaris; identical to SEQ ID NO: 2244

SEQ ID NO: 212352 - DNA, 1400 bp, Canis familiaris
gtactcctggatggggctcatggtgtttgccatgggctggcgatccttcaccaatgtcaactccaggatgctctacttcgcccctgacctggttttcaatgagtaccgcatgcacaagtcccggatgtacagccagtgtgtccgaatgaggcacctctctcaagaatttggatggctccaaatcaccccgcaggaatttttgtgcatgaaggcgctgctgctattcagcattattccagtggatgggctgaaaaatcaaaaattctttgatgaacttcgaatgaactacatcaaggaacttgatcgtatcattgcttgcaagagaaaaaatcccacatcctgctcaaggcgcttctaccagctcaccaagctcctggactctgtgcaacctattgctcgagagctgcatcagttcacttttgacctgctaatcaagtcccacatggtgagcgtggactttccagaaatgatggcagaaatcatctccgtgcaagtgcccaagattctttctgggaaagtcaagcccatctatttccacacgcagtgaagctttagaagcccctgtcttctcaccaccaccaccaccacccccgccccctactttttaaaaccttggtgtttgtttcatctgcttttagaacgtgcgatatttccagtacctacttttttgctgaatccaaagatatataaatataaatatatatattttataaagatcaaaatgatataaaggagatacgtttcttcctttaaaaaaaaacaaatagaaattcattgttaatgttcgtattatgatgccacttttctaaatcgtgcatcttgtatatgtgctgccgaagtgagcactaaatcgtgcatcttgatggaaaggtgtaaatatcaatcaccaggactgcttagttaattggtatttaatatctaggtgaattgggggtatggggtgggggtatgacaggacatacttggcttgccctcctcgaaatgactgccagttttccatatgcctgtccagttccaggaattttgttcacaagtgtgggggcgtcataggagtaaagcctgtaggacagatgaaaccccctgcttcagaggagcaagagctccaaggccaactgtttaacaagcaaggtgtttttttttctttctttctttctctttccaatgtgtggaattttgatgatggaaatgtcattctgagagcaatatttaaaattctcaggaattgacttatagtattgagaatgaattcagttgcaatcaagtttacattaaatgttgcttttaaaaaatctcagtcatacttcacactgcaaagaatccagatcacatgggataacttatgagatggttgagtggtaagctctgactgctttgctgatcattttgtaaataaaggtttc

SEQ ID NO: 212353 - DNA, 553 bp, Canis familiaris; identical to SEQ ID NO: 2246

SEQ ID NO: 212354 - DNA, 628 bp, Canis familiaris; identical to SEQ ID NO: 2247

SEQ ID NO: 212355 - DNA, 614 bp, Canis familiaris; identical to SEQ ID NO: 2248

SEQ ID NO: 212356 - DNA, 714 bp, Canis familiaris; identical to SEQ ID NO: 2249

SEQ ID NO: 212357 - DNA, 614 bp, Canis familiaris; identical to SEQ ID NO: 2250

SEQ ID NO: 212358 - DNA, 726 bp, Canis familiaris; identical to SEQ ID NO: 2251

SEQ ID NO: 212359 - DNA, 600 bp, Canis familiaris
gggatccagtctctctatggcccaggagatgaagaccccaaccccagacatcccaaaacaccagacaaatgtgatccctccttatcccttgatgccatcaccagcctccgaggagaaacaatgatctttaaagacagattcttctggcgattgcatcctcagcaggtggatgcggagctgtttttaacaaaatccttttggccggaacttcccaaccgtatcgatgctgcatatgagcacccctcccgcgaccttatcttcatcttcagaggcagaaaatattgggctcttaatggttatgacattctggaaggttatccccaaaaaatatctgaactgggatttccaaaagaggttaagaagataagtgcagctgttcactttgaggacacggggaagacgctcttcttctcgggaaaccaggtctggagctatgatgatactaaccagatcatggataaagactaccccaggctgatagaagaggacttcccagggattggtgataaagtggatgccgtctatgagaaaaacggttatatctattttttcaatgggcccatccagtttgagtataacatctggagtaacccgtattgt

SEQ ID NO: 212360 - DNA, 557 bp, Canis familiaris; identical to SEQ ID NO: 2253

SEQ ID NO: 212361 - DNA, 601 bp, Canis familiaris; identical to SEQ ID NO: 2254

SEQ ID NO: 212362 - DNA, 667 bp, Canis familiaris; identical to SEQ ID NO: 2255

SEQ ID NO: 212363 - DNA, 668 bp, Canis familiaris; identical to SEQ ID NO: 2256

SEQ ID NO: 212364 - DNA, 566 bp, Canis familiaris; identical to SEQ ID NO: 2257

SEQ ID NO: 212365 - DNA, 693 bp, Canis familiaris; identical to SEQ ID NO: 2258

SEQ ID NO: 212366 - DNA, 586 bp, Canis familiaris; identical to SEQ ID NO: 2259

SEQ ID NO: 212367 - DNA, 625 bp, Canis familiaris; identical to SEQ ID NO: 2260

SEQ ID NO: 212368 - DNA, 687 bp, Canis familiaris; identical to SEQ ID NO: 2261

SEQ ID NO: 212369 - DNA, 728 bp, Canis familiaris; identical to SEQ ID NO: 2262

SEQ ID NO: 212370 - DNA, 680 bp, Canis familiaris; identical to SEQ ID NO: 2263

SEQ ID NO: 212371 - DNA, 685 bp, Canis familiaris; identical to SEQ ID NO: 2264

SEQ ID NO: 212372 - DNA, 685 bp, Canis familiaris; identical to SEQ ID NO: 2265

SEQ ID NO: 212373 - DNA, 909 bp, Canis familiaris; identical to SEQ ID NO: 2266

SEQ ID NO: 212374 - DNA, 622 bp, Canis familiaris; identical to SEQ ID NO: 2267

SEQ ID NO: 212375 - DNA, 743 bp, Canis familiaris; identical to SEQ ID NO: 2268

SEQ ID NO: 212376 - DNA, 675 bp, Canis familiaris; identical to SEQ ID NO: 2269

SEQ ID NO: 212377 - DNA, 579 bp, Canis familiaris; identical to SEQ ID NO: 2270

SEQ ID NO: 212378 - DNA, 640 bp, Canis familiaris; identical to SEQ ID NO: 2271

SEQ ID NO: 212379 - DNA, 640 bp, Canis familiaris; identical to SEQ ID NO: 2272

SEQ ID NO: 212380 - DNA, 636 bp, Canis familiaris; identical to SEQ ID NO: 2273

SEQ ID NO: 212381 - DNA, 627 bp, Canis familiaris; identical to SEQ ID NO: 2274

SEQ ID NO: 212382 - DNA, 639 bp, Canis familiaris; identical to SEQ ID NO: 2275

SEQ ID NO: 212383 - DNA, 644 bp, Canis familiaris; identical to SEQ ID NO: 2276

SEQ ID NO: 212384 - DNA, 619 bp, Canis familiaris; identical to SEQ ID NO: 2277

SEQ ID NO: 212385 - DNA, 599 bp, Canis familiaris; identical to SEQ ID NO: 2278

SEQ ID NO: 212386 - DNA, 605 bp, Canis familiaris; identical to SEQ ID NO: 2279

SEQ ID NO: 212387 - DNA, 602 bp, Canis familiaris; identical to SEQ ID NO: 2280

SEQ ID NO: 212388 - DNA, 674 bp, Canis familiaris; identical to SEQ ID NO: 2281

SEQ ID NO: 212389 - DNA, 608 bp, Canis familiaris; identical to SEQ ID NO: 2282

SEQ ID NO: 212390 - DNA, 677 bp, Canis familiaris; identical to SEQ ID NO: 2283

SEQ ID NO: 212391 - DNA, 600 bp, Canis familiaris
tgccattcagaagtttttttcattgatccctttcataggcagagagagagtatcattttgctagtctttagggagcaaggagtcaagattctcattttttatcttcacccctattgtagagaaaggaataaaggcgacttatgagaacactgggaatggagagccagagctgtcaaaatgttgagtgggtaccacaattgggaaatatcagctccaattctcctttgcacctcacaaagtcttttctcagccagccccagcacttccagatgagattttattgtaaaagagagaattgggcatgggcagaagggcatgatgacagagagagagagagagagagagacagagacagagagagagacagagagggggaaagagagagagaggtcatcattagcaaagaccagtgataaagtcaaaaattatggatatgggtaatttttttcttcacaaaaactcaaaagtttgcgagaatacatacttaaagcaatgtattgttcacagacatattttgggtggttttttgcagctttttgttggtgttggattatatcggcatcaatatggcctccctgaattcctgcattaatcctatag

SEQ ID NO: 212392 - DNA, 710 bp, Canis familiaris; identical to SEQ ID NO: 2285

SEQ ID NO: 212393 - DNA, 656 bp, Canis familiaris; identical to SEQ ID NO: 2286

SEQ ID NO: 212394 - DNA, 640 bp, Canis familiaris; identical to SEQ ID NO: 2287

SEQ ID NO: 212395 - DNA, 752 bp, Canis familiaris; identical to SEQ ID NO: 2288

SEQ ID NO: 212396 - DNA, 682 bp, Canis familiaris; identical to SEQ ID NO: 2289

SEQ ID NO: 212397 - DNA, 677 bp, Canis familiaris; identical to SEQ ID NO: 2290
  misc_feature (13)..(13): n is a, c, g, or t

SEQ ID NO: 212398 - DNA, 653 bp, Canis familiaris; identical to SEQ ID NO: 2291

SEQ ID NO: 212399 - DNA, 653 bp, Canis familiaris; identical to SEQ ID NO: 2292

SEQ ID NO: 212400 - DNA, 725 bp, Canis familiaris; identical to SEQ ID NO: 2293

SEQ ID NO: 212401 - DNA, 662 bp, Canis familiaris; identical to SEQ ID NO: 2294

SEQ ID NO: 212402 - DNA, 657 bp, Canis familiaris; identical to SEQ ID NO: 2295

SEQ ID NO: 212403 - DNA, 572 bp, Canis familiaris; identical to SEQ ID NO: 2296

SEQ ID NO: 212404 - DNA, 684 bp, Canis familiaris; identical to SEQ ID NO: 2297

SEQ ID NO: 212405 - DNA, 684 bp, Canis familiaris; identical to SEQ ID NO: 2298

SEQ ID NO: 212406 - DNA, 631 bp, Canis familiaris; identical to SEQ ID NO: 2299

SEQ ID NO: 212407 - DNA, 683 bp, Canis familiaris; identical to SEQ ID NO: 2300

SEQ ID NO: 212408 - DNA, 708 bp, Canis familiaris; identical to SEQ ID NO: 2301
  misc_feature (84)..(84): n is a, c, g, or t

SEQ ID NO: 212409 - DNA, 679 bp, Canis familiaris; identical to SEQ ID NO: 2302

SEQ ID NO: 212410 - DNA, 679 bp, Canis familiaris; identical to SEQ ID NO: 2303

SEQ ID NO: 212411 - DNA, 602 bp, Canis familiaris; identical to SEQ ID NO: 2304

SEQ ID NO: 212412 - DNA, 602 bp, Canis familiaris; identical to SEQ ID NO: 2305

SEQ ID NO: 212413 - DNA, 756 bp, Canis familiaris; identical to SEQ ID NO: 2306

SEQ ID NO: 212414 - DNA, 732 bp, Canis familiaris; identical to SEQ ID NO: 2307
  misc_feature (50)..(50): n is a, c, g, or t

SEQ ID NO: 212415 - DNA, 621 bp, Canis familiaris; identical to SEQ ID NO: 2308

SEQ ID NO: 212416 - DNA, 633 bp, Canis familiaris; identical to SEQ ID NO: 2309

SEQ ID NO: 212417 - DNA, 631 bp, Canis familiaris; identical to SEQ ID NO: 2310

SEQ ID NO: 212418 - DNA, 666 bp, Canis familiaris; identical to SEQ ID NO: 2311

SEQ ID NO: 212419 - DNA, 666 bp, Canis familiaris; identical to SEQ ID NO: 2312

SEQ ID NO: 212420 - DNA, 628 bp, Canis familiaris; identical to SEQ ID NO: 2313
  misc_feature (107)..(107): n is a, c, g, or t

SEQ ID NO: 212421 - DNA, 666 bp, Canis familiaris; identical to SEQ ID NO: 2314

SEQ ID NO: 212422 - DNA, 625 bp, Canis familiaris; identical to SEQ ID NO: 2315

SEQ ID NO: 212423 - DNA, 624 bp, Canis familiaris; identical to SEQ ID NO: 2316
  misc_feature (349)..(349): n is a, c, g, or t

SEQ ID NO: 212424 - DNA, 668 bp, Canis familiaris; identical to SEQ ID NO: 2317

SEQ ID NO: 212425 - DNA, 899 bp, Canis familiaris; identical to SEQ ID NO: 2318

SEQ ID NO: 212426 - DNA, 687 bp, Canis familiaris; identical to SEQ ID NO: 2319

SEQ ID NO: 212427 - DNA, 716 bp, Canis familiaris; identical to SEQ ID NO: 2320
  misc_feature (33)..(33): n is a, c, g, or t

SEQ ID NO: 212428 - DNA, 612 bp, Canis familiaris; identical to SEQ ID NO: 2321

SEQ ID NO: 212429 - DNA, 703 bp, Canis familiaris; identical to SEQ ID NO: 2322

SEQ ID NO: 212430 - DNA, 887 bp, Canis familiaris; identical to SEQ ID NO: 2323

SEQ ID NO: 212431 - DNA, 662 bp, Canis familiaris; identical to SEQ ID NO: 2324

SEQ ID NO: 212432 - DNA, 622 bp, Canis familiaris; identical to SEQ ID NO: 2325

SEQ ID NO: 212433 - DNA, 600 bp, Canis familiaris
gggccaggccaagtcctggtgccccggcggaggggatgacaggacgggctgataggccccagtgcccggctgtggtggggaggatgtgatgggagggagaagggcatggggtgcagagctggtgcatggggaggaaggcacaaggaagcctggtgagcttcggcagctccagctgcatggaagggagcaggctggggcccggggggaggctgggggagcagagtgggagccgtgcaggggcagctctgaaggcatcctgcttccccttgcccagggcagccccggtgctgatggtcctcctggcagagatggcgcagctggagtcaaggtgagtatctggcggtctctatgtgcagtggggacagggaggacattctgttgggcctaacaggtcagcctggggtggcaggtcgggggtcaggatcttgtctcagttcgggaggtcagtttctccatgtctccctggaacactcttctctaagcccgagacctctctcctgacagggtgatcgtggtgagactggtcccgtgggtgctcctggagcccctgggtcccctggctctcctggccccgctggcccaactggaaagcagggagac

SEQ ID NO: 212434 - DNA, 631 bp, Canis familiaris; identical to SEQ ID NO: 2327

SEQ ID NO: 212435 - DNA, 683 bp, Canis familiaris; identical to SEQ ID NO: 2328

SEQ ID NO: 212436 - DNA, 683 bp, Canis familiaris; identical to SEQ ID NO: 2329

SEQ ID NO: 212437 - DNA, 715 bp, Canis familiaris; identical to SEQ ID NO: 2330

SEQ ID NO: 212438 - DNA, 715 bp, Canis familiaris; identical to SEQ ID NO: 2331

SEQ ID NO: 212439 - DNA, 654 bp, Canis familiaris; identical to SEQ ID NO: 2332

SEQ ID NO: 212440 - DNA, 727 bp, Canis familiaris; identical to SEQ ID NO: 2333

SEQ ID NO: 212441 - DNA, 699 bp, Canis familiaris; identical to SEQ ID NO: 2334

SEQ ID NO: 212442 - DNA, 600 bp, Canis familiaris
gcaacgggctgctgtgcggcggtcggggcaagtgtgagtgtggcagctgcgtgtgcatccaacctggctcctacggggacacctgcgagaagtgccccacctgccctgacgcctgcacctttaagaaggagtgtgtggagtgtaagaaatttgaccgaggaactctccatgatgataatacctgcaaccgttactgtcgtgatgagattgagtctgtgaaggagcttaaggatactggcaaggatgcagtgaattgtacatacaagaatgaggatgactgtgttgtcagatttcagtactatgaagactccagtggaaagtccattctctatgtggtagaagagccagagtgtcccaagggtcctgacatcctggtggtcctgctttcagtgatgggggccattttgctcattggccttgctactctgctcatctggaagctcctcatcaccatccatgatcggaaggagtttgctaaatttgaggaagagcgagccagagcaaaatgggacacagccaacaacccactgtataaagaggccacatccacttttaccaacatcacctaccggggcacttaacaccaaggagccatcctca

SEQ ID NO: 212443 - DNA, 600 bp, Canis familiaris
taccagctacagttctgtctgttgttgcatcccttttctggactgttctggagggaagtaacatttgtggagcatctactgcatgtctcacatattatgaacacaatcttatctaacgcccaaagcaagtctgtgggatgggaaatagtagtaggtccaagtctggtgggatctgaggctgataacatttggagggggctctctttctgaaaaataaaaaaaagttgacagtaaaactgtgagagcttctcccaaggccctggaaggagcctgcacaaaacacagatctggaagccagagctttacagtaaacccaacaagacagtggttttgaactcctattacagaggaggaaactgaagttcaggagggtttatgtggtggaatcaggattcaaatctagatctgactcccaaacccctgtgcccctggtctgttctccactggtcttgacgggcagctgtgttgagcacctgctggatgtggagtccattatcagtccattggggaagtagctagagactcagaaggtactgtttccgctcagaatgagctcatagtgtagttggggaagctgttgaggaaccatttcacacgatc

SEQ ID NO: 212444 - DNA, 896 bp, Canis familiaris; identical to SEQ ID NO: 2337

SEQ ID NO: 212445 - DNA, 896 bp, Canis familiaris; identical to SEQ ID NO: 2338

SEQ ID NO: 212446 - DNA, 676 bp, Canis familiaris; identical to SEQ ID NO: 2339

SEQ ID NO: 212447 - DNA, 700 bp, Canis familiaris; identical to SEQ ID NO: 2340
  misc_feature (60)..(60): n is a, c, g, or t

SEQ ID NO: 212448 - DNA, 707 bp, Canis familiaris; identical to SEQ ID NO: 2341

SEQ ID NO: 212449 - DNA, 631 bp, Canis familiaris; identical to SEQ ID NO: 2342

SEQ ID NO: 212450 - DNA, 610 bp, Canis familiaris; identical to SEQ ID NO: 2343

SEQ ID NO: 212451 - DNA, 691 bp, Canis familiaris; identical to SEQ ID NO: 2344

SEQ ID NO: 212452 - DNA, 590 bp, Canis familiaris; identical to SEQ ID NO: 2345

SEQ ID NO: 212453 - DNA, 622 bp, Canis familiaris; identical to SEQ ID NO: 2346

SEQ ID NO: 212454 - DNA, 680 bp, Canis familiaris; identical to SEQ ID NO: 2347

SEQ ID NO: 212455 - DNA, 701 bp, Canis familiaris; identical to SEQ ID NO: 2348

SEQ ID NO: 212456 - DNA, 683 bp, Canis familiaris; identical to SEQ ID NO: 2349

SEQ ID NO: 212457 - DNA, 668 bp, Canis familiaris; identical to SEQ ID NO: 2350

SEQ ID NO: 212458 - DNA, 645 bp, Canis familiaris; identical to SEQ ID NO: 2351

SEQ ID NO: 212459 - DNA, 617 bp, Canis familiaris; identical to SEQ ID NO: 2352

SEQ ID NO: 212460 - DNA, 570 bp, Canis familiaris; identical to SEQ ID NO: 2353

SEQ ID NO: 212461 - DNA, 645 bp, Canis familiaris; identical to SEQ ID NO: 2354

SEQ ID NO: 212462 - DNA, 600 bp, Canis familiaris
gggccaggagcctccccacagcctcaccragcccaggaatattccagtgcctcaaccactcccaaaacctgctgagagccgtcagcaacacgcttcagaaggccagacaaactctagaattatattccctgcacttccgaagagattgatcatgaagatatcacaaaggataaaaccagcacagtggaggcctgcttaccactggaattaaccatgaatgagagttgcctggcttccagagagatctctttgataactaacgggagttgcctggcctctggaaaggcctcttttatgacggtcctgtgccttagcagcatctatgaggacttgaagatgtaccagatggaattcaaggccatgaacgcaaagcttttaatggatcccaagaggcagatctttctggatcaaaacatgytgacagctatcgatgagctgttacaggccctgaatttcaacagtgtgactgtgccacagaaatcctcccttgaagagccggatttttataaaactaaaatcaagctctgcatacttcttcatgctttcagaattcgtgcggtgaccatcgatagaatgatgagttatctgaattcttcctaa

SEQ ID NO: 212463 - DNA, 695 bp, Canis familiaris; identical to SEQ ID NO: 2356

SEQ ID NO: 212464 - DNA, 611 bp, Canis familiaris; identical to SEQ ID NO: 2357

SEQ ID NO: 212465 - DNA, 611 bp, Canis familiaris; identical to SEQ ID NO: 2358

SEQ ID NO: 212466 - DNA, 650 bp, Canis familiaris; identical to SEQ ID NO: 2359
  misc_feature (53)..(53): n is a, c, g, or t

SEQ ID NO: 212467 - DNA, 668 bp, Canis familiaris; identical to SEQ ID NO: 2360

SEQ ID NO: 212468 - DNA, 908 bp, Canis familiaris; identical to SEQ ID NO: 2361

SEQ ID NO: 212469 - DNA, 650 bp, Canis familiaris; identical to SEQ ID NO: 2362

SEQ ID NO: 212470 - DNA, 752 bp, Canis familiaris; identical to SEQ ID NO: 2363

SEQ ID NO: 212471 - DNA, 674 bp, Canis familiaris; identical to SEQ ID NO: 2364
  misc_feature (31)..(31): n is a, c, g, or t

SEQ ID NO: 212472 - DNA, 667 bp, Canis familiaris; identical to SEQ ID NO: 2365

SEQ ID NO: 212473 - DNA, 732 bp, Canis familiaris; identical to SEQ ID NO: 2366

SEQ ID NO: 212474 - DNA, 706 bp, Canis familiaris; identical to SEQ ID NO: 2367

SEQ ID NO: 212475 - DNA, 657 bp, Canis familiaris; identical to SEQ ID NO: 2368

SEQ ID NO: 212476 - DNA, 655 bp, Canis familiaris; identical to SEQ ID NO: 2369

SEQ ID NO: 212477 - DNA, 655 bp, Canis familiaris; identical to SEQ ID NO: 2370

SEQ ID NO: 212478 - DNA, 1056 bp, Canis familiaris; identical to SEQ ID NO: 2371

SEQ ID NO: 212479 - DNA, 589 bp, Canis familiaris; identical to SEQ ID NO: 2372

SEQ ID NO: 212480 - DNA, 1400 bp, Canis familiaris
agagggtaaatcccgggagatttgctgctgcccatcctaggctgggctagccccaccccatcccacccccagggtgccctgaggcccaaggcagccactgcctccgttgcttgtcctgctctcaatgccaattaatcatggactgaggactagggccgaggttgagttctgtctggttttgttgcagtttgggtttgggaggctggaagagcactgcgggaactattactgagactctggggtcaggagacggcagggggccctcagcctcacctggggaccaggaccacactgggcatttgaagaggcagaagtagtgctacttctcattggtggcagagtgaatgctccagcccccaccccctgtccagggggtctcagaagagtttcgggagcctgttggccccaggccctgttacttgcttttcatccatccttgggcaatgccatcttcaaacagttttatttattaaagtgtttgttcagtatgggactggagagggagctcattgcctcctgcccaccagtcaccttgttcacactaatgtttacagaacctcagtttagcatagcgtccaaggccctgccactccctcctagtggtgaactgaccgtatccataggccacagggctatttaagagcagaggctacattcaaagtcactaccaccagcctctttctttcttcctcttccatttgctcactgccctggaatcaacaggctggttgctggttgcattttctgaaacaggaagtaggaatcactgtttggcagaggcctctagcaaaggaggggtaatgggaatccaacccccttaggactggagaaagagctgcaattaaccaggttgccttttcccactctagctgccccagggggctaggttgtagaggtgacaaggaacccactgtactaatttgtgccattcttaactttggacttgtctggtaaaggagagagggggccgaaccagagtgccaggagctgacaggcttatctcccctgatccagtggggccaggtgcctaccctagaccaggctggcctagcagtgtccaaaggctttttagcccagatggtgcaaagctggggctagcagatcttcacccgcaccctcacctgtgacacccaagacctgcccgataccagattccgggcagcattctcccccatgccgtccaacgaccaaaggccctgccaggtatgggccaaggcagcaggtgtgtgtgaaagcgatgtggcgacccgtggactgcagtgtgcttaaccagctcacctcccttctcttagcccaagcctgtcccttgcacaaaccacgttgcctggtggggcccagtgtacttaaataaagtccttccaatagaaaaaaaaaaaaaaaaaaaaaaaaaaaaaaaaaaa

SEQ ID NO: 212481 - DNA, 728 bp, Canis familiaris; identical to SEQ ID NO: 2374

SEQ ID NO: 212482 - DNA, 639 bp, Canis familiaris; identical to SEQ ID NO: 2375

SEQ ID NO: 212483 - DNA, 614 bp, Canis familiaris; identical to SEQ ID NO: 2376

SEQ ID NO: 212484 - DNA, 721 bp, Canis familiaris; identical to SEQ ID NO: 2377

SEQ ID NO: 212485 - DNA, 626 bp, Canis familiaris; identical to SEQ ID NO: 2378
  misc_feature (39)..(39): n is a, c, g, or t

SEQ ID NO: 212486 - DNA, 685 bp, Canis familiaris; identical to SEQ ID NO: 2379

SEQ ID NO: 212487 - DNA, 628 bp, Canis familiaris; identical to SEQ ID NO: 2380

SEQ ID NO: 212488 - DNA, 600 bp, Canis familiaris; identical to SEQ ID NO: 2381

SEQ ID NO: 212489 - DNA, 600 bp, Canis familiaris; identical to SEQ ID NO: 2382

SEQ ID NO: 212490 - DNA, 646 bp, Canis familiaris; identical to SEQ ID NO: 2383

SEQ ID NO: 212491 - DNA, 660 bp, Canis familiaris; identical to SEQ ID NO: 2384

SEQ ID NO: 212492 - DNA, 573 bp, Canis familiaris; identical to SEQ ID NO: 2385

SEQ ID NO: 212493 - DNA, 759 bp, Canis familiaris; identical to SEQ ID NO: 2386

SEQ ID NO: 212494 - DNA, 704 bp, Canis familiaris; identical to SEQ ID NO: 2387
  misc_feature (3)..(3): n is a, c, g, or t

SEQ ID NO: 212495 - DNA, 704 bp, Canis familiaris; identical to SEQ ID NO: 2388
  misc_feature (3)..(3): n is a, c, g, or t

SEQ ID NO: 212496 - DNA, 623 bp, Canis familiaris; identical to SEQ ID NO: 2389

SEQ ID NO: 212497 - DNA, 623 bp, Canis familiaris; identical to SEQ ID NO: 2390

SEQ ID NO: 212498 - DNA, 609 bp, Canis familiaris; identical to SEQ ID NO: 2391

SEQ ID NO: 212499 - DNA, 605 bp, Canis familiaris; identical to SEQ ID NO: 2392

SEQ ID NO: 212500 - DNA, 745 bp, Canis familiaris; identical to SEQ ID NO: 2393

SEQ ID NO: 212501 - DNA, 715 bp, Canis familiaris; identical to SEQ ID NO: 2394

SEQ ID NO: 212502 - DNA, 663 bp, Canis familiaris; identical to SEQ ID NO: 2395

SEQ ID NO: 212503 - DNA, 618 bp, Canis familiaris; identical to SEQ ID NO: 2396

SEQ ID NO: 212504 - DNA, 644 bp, Canis familiaris; identical to SEQ ID NO: 2397

SEQ ID NO: 212505 - DNA, 644 bp, Canis familiaris; identical to SEQ ID NO: 2398

SEQ ID NO: 212506 - DNA, 683 bp, Canis familiaris; identical to SEQ ID NO: 2399

SEQ ID NO: 212507 - DNA, 848 bp, Canis familiaris; identical to SEQ ID NO: 2400

SEQ ID NO: 212508 - DNA, 687 bp, Canis familiaris; identical to SEQ ID NO: 2401

SEQ ID NO: 212509 - DNA, 653 bp, Canis familiaris; identical to SEQ ID NO: 2402

SEQ ID NO: 212510 - DNA, 616 bp, Canis familiaris; identical to SEQ ID NO: 2403

SEQ ID NO: 212511 - DNA, 671 bp, Canis familiaris; identical to SEQ ID NO: 2404

SEQ ID NO: 212512 - DNA, 651 bp, Canis familiaris; identical to SEQ ID NO: 2405

SEQ ID NO: 212513 - DNA, 693 bp, Canis familiaris; identical to SEQ ID NO: 2406

SEQ ID NO: 212514 - DNA, 782 bp, Canis familiaris; identical to SEQ ID NO: 2407

SEQ ID NO: 212515 - DNA, 679 bp, Canis familiaris; identical to SEQ ID NO: 2408
  misc_feature (16)..(16): n is a, c, g, or t

SEQ ID NO: 212516 - DNA, 645 bp, Canis familiaris; identical to SEQ ID NO: 2409

SEQ ID NO: 212517 - DNA, 617 bp, Canis familiaris; identical to SEQ ID NO: 2410

SEQ ID NO: 212518 - DNA, 653 bp, Canis familiaris; identical to SEQ ID NO: 2411

SEQ ID NO: 212519 - DNA, 640 bp, Canis familiaris; identical to SEQ ID NO: 2412

SEQ ID NO: 212520 - DNA, 653 bp, Canis familiaris; identical to SEQ ID NO: 2413

SEQ ID NO: 212521 - DNA, 430 bp, Canis familiaris; identical to SEQ ID NO: 2414

SEQ ID NO: 212522 - DNA, 600 bp, Canis familiaris
ggctggggtcagccccatggtggyggctggggtcagccycatggtggcggctggggtcagccccacggtggtggctggggacagccacatggtggtggtggttggggtcaaggtggtggcagccacrgtcagtggggcaagcccartaagcccaaaaccaacatgaagcacgtggcaggagccgcagcagccggggcggtagtagggggccttggtggctacatgctggggagtgccatgagcaggccactcattcattttggcaatgactatgaggaccgttactatcgtgagaacatgtaccgctaccccgascargtatactaccggccagtggatcagtacagcaaccagaacaactttgtgcgtgactgcgtcaacatcactgtcaagcagcacacagtgaccaccaccaccaagggggagaacttcacagagaccgacatgaagatcatggagcgtgtggtggagcagatgtgtgtcacccagtaccagaaggagtccgaggcttactaccaaagaggggcaagcgccatcctcttctccccgccrcccgtgatcctcctcatctcgctgctcattctcytgatagtgggatga

SEQ ID NO: 212523 - DNA, 872 bp, Canis familiaris; identical to SEQ ID NO: 2416

SEQ ID NO: 212524 - DNA, 664 bp, Canis familiaris; identical to SEQ ID NO: 2417

SEQ ID NO: 212525 - DNA, 660 bp, Canis familiaris; identical to SEQ ID NO: 2418

SEQ ID NO: 212526 - DNA, 695 bp, Canis familiaris; identical to SEQ ID NO: 2419

SEQ ID NO: 212527 - DNA, 722 bp, Canis familiaris; identical to SEQ ID NO: 2420

SEQ ID NO: 212528 - DNA, 595 bp, Canis familiaris; identical to SEQ ID NO: 2421

SEQ ID NO: 212529 - DNA, 632 bp, Canis familiaris; identical to SEQ ID NO: 2422

SEQ ID NO: 212530 - DNA, 731 bp, Canis familiaris; identical to SEQ ID NO: 2423

SEQ ID NO: 212531 - DNA, 600 bp, Canis familiaris
gaagatatctttggtgctgtgtttccctatgaggtgaaaaaagatggtgcagcaaaacagcccagcgatcccagagttccagcagcccacggaagaagttaaagttgctgccatagaattgaatgatgaaaccaactctcgattatccgaggcacagggcctggggagatggaaggaaattgcatccccgagcctcatatctatctccccagctgcttccccaccacacccgatacttgacctggactgttacacccagatgatggaactcttgtctcccttgagcccaccctttccaggtaatggagagaatgggccttccaggtctcttgaaaactaaatctgcagtgccaggcccagctgatgggtgagaaggatggcactttcatctgattgcaccactttgagtgaccagcaggagacgatgtcgtcctgccctgtatttatttgccctgtgtacagttatttataactctgtatttaaaacaaaacaaaacaaaacaaaaccccaacccactcttctcggaagggccacttgggccctccctgtaccactccttgaaaggagatatttatatgaaatgcattttattttaacca

SEQ ID NO: 212532 - DNA, 637 bp, Canis familiaris; identical to SEQ ID NO: 2425

SEQ ID NO: 212533 - DNA, 637 bp, Canis familiaris; identical to SEQ ID NO: 2426
  misc_feature (42)..(42): n is a, c, g, or t

SEQ ID NO: 212534 - DNA, 643 bp, Canis familiaris; identical to SEQ ID NO: 2427

SEQ ID NO: 212535 - DNA, 770 bp, Canis familiaris; identical to SEQ ID NO: 2428

SEQ ID NO: 212536 - DNA, 943 bp, Canis familiaris; identical to SEQ ID NO: 2429

SEQ ID NO: 212537 - DNA, 624 bp, Canis familiaris; identical to SEQ ID NO: 2430

SEQ ID NO: 212538 - DNA, 639 bp, Canis familiaris; identical to SEQ ID NO: 2431

SEQ ID NO: 212539 - DNA, 605 bp, Canis familiaris; identical to SEQ ID NO: 2432

SEQ ID NO: 212540 - DNA, 674 bp, Canis familiaris; identical to SEQ ID NO: 2433

SEQ ID NO: 212541 - DNA, 678 bp, Canis familiaris; identical to SEQ ID NO: 2434

SEQ ID NO: 212542 - DNA, 675 bp, Canis familiaris; identical to SEQ ID NO: 2435

SEQ ID NO: 212543 - DNA, 675 bp, Canis familiaris; identical to SEQ ID NO: 2436

SEQ ID NO: 212544 - DNA, 666 bp, Canis familiaris; identical to SEQ ID NO: 2437
  misc_feature (45)..(45): n is a, c, g, or t

SEQ ID NO: 212545 - DNA, 635 bp, Canis familiaris; identical to SEQ ID NO: 2438

SEQ ID NO: 212546 - DNA, 1259 bp, Canis familiaris; identical to SEQ ID NO: 2439

SEQ ID NO: 212547 - DNA, 578 bp, Canis familiaris; identical to SEQ ID NO: 2440

SEQ ID NO: 212548 - DNA, 587 bp, Canis familiaris; identical to SEQ ID NO: 2441

SEQ ID NO: 212549 - DNA, 687 bp, Canis familiaris; identical to SEQ ID NO: 2442

SEQ ID NO: 212550 - DNA, 744 bp, Canis familiaris; identical to SEQ ID NO: 2443
  misc_feature (224)..(224): n is a, c, g, or t

SEQ ID NO: 212551 - DNA, 724 bp, Canis familiaris; identical to SEQ ID NO: 2444

SEQ ID NO: 212552 - DNA, 1144 bp, Canis familiaris; identical to SEQ ID NO: 2445

SEQ ID NO: 212553 - DNA, 800 bp, Canis familiaris; identical to SEQ ID NO: 2446
  misc_feature (654)..(654): n is a, c, g, or t
  misc_feature (666)..(666): n is a, c, g, or t
  misc_feature (689)..(689): n is a, c, g, or t
  misc_feature (737)..(737): n is a, c, g, or t
  misc_feature (772)..(772): n is a, c, g, or t

SEQ ID NO: 212554 - DNA, 618 bp, Canis familiaris; identical to SEQ ID NO: 2447

SEQ ID NO: 212555 - DNA, 705 bp, Canis familiaris; identical to SEQ ID NO: 2448

SEQ ID NO: 212556 - DNA, 645 bp, Canis familiaris; identical to SEQ ID NO: 2449

SEQ ID NO: 212557 - DNA, 586 bp, Canis familiaris; identical to SEQ ID NO: 2450

SEQ ID NO: 212558 - DNA, 592 bp, Canis familiaris; identical to SEQ ID NO: 2451

SEQ ID NO: 212559 - DNA, 653 bp, Canis familiaris; identical to SEQ ID NO: 2452

SEQ ID NO: 212560 - DNA, 600 bp, Canis familiaris
tccttctaaaaaaaaatgagatttagataatcataatttctttgtgatacaggcagaccataactaaaaactcttttatatatttagcaatctaatagacaacgaatgtagatttattaaactttcttgttcctattatgaaagtgtattttaggtgcccatcttctccaattattttttaacatttaaaagccaaagttctctacacctgattggtatgtggctttgctgagcgcaaggcggtaccatgcaaaaaggctaaattactgaaatgtcagaccaaactttttcacaaaccagggactatcatctaagagtaatcccagtaattagtatatgtatatgtatgtgtatatatacctaagtgtatgtatatgtatatatatacactcctattattgttacaagattctcaagctttatgaccttcaacacttccatttaatataggcaattactgattatttctgattttacaataagaaagcctctctctctaatcaactgacaacttaatctctgtgatgttatttgattagaagctatctattaaaagcttacataacatcaaagcaaaaaaaaaaaaaaaaaaaaaaaaaa

SEQ ID NO: 212561 - DNA, 770 bp, Canis familiaris; identical to SEQ ID NO: 2454

SEQ ID NO: 212562 - DNA, 692 bp, Canis familiaris; identical to SEQ ID NO: 2455

SEQ ID NO: 212563 - DNA, 625 bp, Canis familiaris; identical to SEQ ID NO: 2456

SEQ ID NO: 212564 - DNA, 603 bp, Canis familiaris; identical to SEQ ID NO: 2457

SEQ ID NO: 212565 - DNA, 685 bp, Canis familiaris; identical to SEQ ID NO: 2458

SEQ ID NO: 212566 - DNA, 671 bp, Canis familiaris; identical to SEQ ID NO: 2459

SEQ ID NO: 212567 - DNA, 620 bp, Canis familiaris; identical to SEQ ID NO: 2460

SEQ ID NO: 212568 - DNA, 674 bp, Canis familiaris; identical to SEQ ID NO: 2461
  misc_feature (40)..(40): n is a, c, g, or t

SEQ ID NO: 212569 - DNA, 674 bp, Canis familiaris; identical to SEQ ID NO: 2462
  misc_feature (40)..(40): n is a, c, g, or t

SEQ ID NO: 212570 - DNA, 657 bp, Canis familiaris; identical to SEQ ID NO: 2463

SEQ ID NO: 212571 - DNA, 594 bp, Canis familiaris; identical to SEQ ID NO: 2464

SEQ ID NO: 212572 - DNA, 600 bp, Canis familiaris
actgaacatttcagagctatgagaatgcttctgaatttgagtttgctagctcttggggctgcctatgtttctgcctttgctgtagaaaatcccatgaatagactggtggcagagaccttgacactgctctccactcatcgaacttggctgataggcgatgggaacctgatgattcctactcctgaaaataaaaatcaccaactgtgcattaaagaagtttttcagggtatagacacattgaagaaccaaactgcccacggggaggctgtggataaactattccaaaacttgtctttaataaaagaacacatagagcgccaaaaaaaaaggtgtgcaggaraaaratggaragtgacaaakttcctaractacctgcaaktatttcttggtgtaatraacaccgagtggayaccggaaagttgagaacaaaccggcttattgtagtggaagattttggagaagaatggttttttggcgatgagaatgagggccaaccaacagtagggacttaatggccagtataactaagcttcagagacaaagtaaatatttcaggcatcctactactttatcacttcacacagatgaaatatatttgag

SEQ ID NO: 212573 - DNA, 748 bp, Canis familiaris; identical to SEQ ID NO: 2466

SEQ ID NO: 212574 - DNA, 744 bp, Canis familiaris; identical to SEQ ID NO: 2467

SEQ ID NO: 212575 - DNA, 709 bp, Canis familiaris; identical to SEQ ID NO: 2468

SEQ ID NO: 212576 - DNA, 711 bp, Canis familiaris; identical to SEQ ID NO: 2469

SEQ ID NO: 212577 - DNA, 711 bp, Canis familiaris; identical to SEQ ID NO: 2470

SEQ ID NO: 212578 - DNA, 729 bp, Canis familiaris; identical to SEQ ID NO: 2471

SEQ ID NO: 212579 - DNA, 683 bp, Canis familiaris; identical to SEQ ID NO: 2472

SEQ ID NO: 212580 - DNA, 673 bp, Canis familiaris; identical to SEQ ID NO: 2473

SEQ ID NO: 212581 - DNA, 1400 bp, Canis familiaris
cctggcagagacggagggcatgctcaaagacctgcagaagagtgtggaggaggaggagcaggtgtggaaggccaaagtgagcgccacggaggaggagcttcagaagtcacgggtcacagtgaaacatctcgaagacattgtagagaagctaaaaggagaacttgaaagttcagagcaggtgagggagcacacctcacatctggaagcagagctggagaagcacatggcagctgccagcgctgagtgccagagctacgccaaggaggtggcggggttgaggcaacttttattagagtctcagtctcagctggatgcagccaagagtgaagcccagaaacaaagcaatgagctcgccctggtcaggcagcagttgagtgagatgaagagccacgtagaggatggtgacgtagctgggtccccagctgcccccccagcagagcaggaccctgtcgagctgaaggcgcagctggagcggacagaggccaccctggaggacgagcaggcgctgcggaggaagctcacggccgagttccaggaggctcagagctctgcgtgccggctccaggccgagctggagaagctccgcagcacagggcccctggagtcttcagcagcagaggaggccacacagctgaaggagagactagaaaaagagaagaaactaaccagtgacctgggacatgctgccaccaaattgcaggagcttttgaagaccacccaggagcagctggcaaaggagagagacacagtgaagaagttgcaggagcagttggrcmaaacagacgacagcagctcaaaggagggcacttctgtctgagtctgctcttcgggaaaagaagttcccattcaacttaccmwaatgccttacacattccttaccaartaaatraaccaaccaacacaccgttatccaggcccaacctccagtagctctgagagaagccatgagagactcttagaatcacagaaatagaccttccagacccctkgtttgtaaaagaacctttgtcacatttgataaacactattccccaggaccagccctggaccaccaccgagcagacgccaaagcccttaccagctctgtgacagaccccagggtatgtgctggggaggccgggacgctgggtatctgtatgtcaatcagtgcaattgttttcttcccctgggcttgggggtcaggaggcgagcggacctggtggtgagtctccagggctgtggagcagactggaggggcccagcccagccggggaggcagcagccyctcacccaccgggggaagtkgccagcaagaatctgatgtgtgacttcctggatgttaatgccattaaaaccaacattgttgcccggcaaaaaaaaaaaaaaaaaaaaaaaaaaaaaaaaaaaaaaaaaaaaaaaaa

SEQ ID NO: 212582 - DNA, 653 bp, Canis familiaris; identical to SEQ ID NO: 2475

SEQ ID NO: 212583 - DNA, 660 bp, Canis familiaris; identical to SEQ ID NO: 2476

SEQ ID NO: 212584 - DNA, 660 bp, Canis familiaris; identical to SEQ ID NO: 2477

SEQ ID NO: 212585 - DNA, 734 bp, Canis familiaris; identical to SEQ ID NO: 2478

SEQ ID NO: 212586 - DNA, 593 bp, Canis familiaris; identical to SEQ ID NO: 2479

SEQ ID NO: 212587 - DNA, 663 bp, Canis familiaris; identical to SEQ ID NO: 2480

SEQ ID NO: 212588 - DNA, 257 bp, Canis familiaris; identical to SEQ ID NO: 2481

SEQ ID NO: 212589 - DNA, 698 bp, Canis familiaris; identical to SEQ ID NO: 2482
  misc_feature (37)..(37): n is a, c, g, or t

SEQ ID NO: 212590 - DNA, 651 bp, Canis familiaris; identical to SEQ ID NO: 2483
  misc_feature (43)..(43): n is a, c, g, or t

SEQ ID NO: 212591 - DNA, 774 bp, Canis familiaris; identical to SEQ ID NO: 2484

SEQ ID NO: 212592 - DNA, 686 bp, Canis familiaris; identical to SEQ ID NO: 2485
  misc_feature (39)..(39): n is a, c, g, or t

SEQ ID NO: 212593 - DNA, 686 bp, Canis familiaris; identical to SEQ ID NO: 2486
  misc_feature (39)..(39): n is a, c, g, or t

SEQ ID NO: 212594 - DNA, 660 bp, Canis familiaris; identical to SEQ ID NO: 2487

SEQ ID NO: 212595 - DNA, 617 bp, Canis familiaris; identical to SEQ ID NO: 2488

SEQ ID NO: 212596 - DNA, 768 bp, Canis familiaris; identical to SEQ ID NO: 2489

SEQ ID NO: 212597 - DNA, 737 bp, Canis familiaris; identical to SEQ ID NO: 2490

SEQ ID NO: 212598 - DNA, 586 bp, Canis familiaris; identical to SEQ ID NO: 2491

SEQ ID NO: 212599 - DNA, 599 bp, Canis familiaris; identical to SEQ ID NO: 2492
  misc_feature (461)..(462): n is a, c, g, or t

SEQ ID NO: 212600 - DNA, 713 bp, Canis familiaris; identical to SEQ ID NO: 2493

SEQ ID NO: 212601 - DNA, 564 bp, Canis familiaris; identical to SEQ ID NO: 2494

SEQ ID NO: 212602 - DNA, 611 bp, Canis familiaris; identical to SEQ ID NO: 2495

SEQ ID NO: 212603 - DNA, 616 bp, Canis familiaris; identical to SEQ ID NO: 2496

SEQ ID NO: 212604 - DNA, 946 bp, Canis familiaris; identical to SEQ ID NO: 2497

SEQ ID NO: 212605 - DNA, 624 bp, Canis familiaris; identical to SEQ ID NO: 2498

SEQ ID NO: 212606 - DNA, 706 bp, Canis familiaris; identical to SEQ ID NO: 2499

SEQ ID NO: 212607 - DNA, 668 bp, Canis familiaris; identical to SEQ ID NO: 2500

SEQ ID NO: 212608 - DNA, 723 bp, Canis familiaris; identical to SEQ ID NO: 2501

SEQ ID NO: 212609 - DNA, 637 bp, Canis familiaris; identical to SEQ ID NO: 2502

SEQ ID NO: 212610 - DNA, 716 bp, Canis familiaris; identical to SEQ ID NO: 2503

SEQ ID NO: 212611 - DNA, 622 bp, Canis familiaris; identical to SEQ ID NO: 2504

SEQ ID NO: 212612 - DNA, 677 bp, Canis familiaris; identical to SEQ ID NO: 2505

SEQ ID NO: 212613 - DNA, 677 bp, Canis familiaris; identical to SEQ ID NO: 2506

SEQ ID NO: 212614 - DNA, 607 bp, Canis familiaris; identical to SEQ ID NO: 2507

SEQ ID NO: 212615 - DNA, 680 bp, Canis familiaris; identical to SEQ ID NO: 2508

SEQ ID NO: 212616 - DNA, 651 bp, Canis familiaris; identical to SEQ ID NO: 2509

SEQ ID NO: 212617 - DNA, 738 bp, Canis familiaris; identical to SEQ ID NO: 2510

SEQ ID NO: 212618 - DNA, 1002 bp, Canis familiaris; identical to SEQ ID NO: 2511

SEQ ID NO: 212619 - DNA, 1002 bp, Canis familiaris; identical to SEQ ID NO: 2512

SEQ ID NO: 212620 - DNA, 691 bp, Canis familiaris; identical to SEQ ID NO: 2513
  misc_feature (53)..(53): n is a, c, g, or t

SEQ ID NO: 212621 - DNA, 742 bp, Canis familiaris; identical to SEQ ID NO: 2514

SEQ ID NO: 212622 - DNA, 742 bp, Canis familiaris; identical to SEQ ID NO: 2515

SEQ ID NO: 212623 - DNA, 587 bp, Canis familiaris; identical to SEQ ID NO: 2516

SEQ ID NO: 212624 - DNA, 665 bp, Canis familiaris; identical to SEQ ID NO: 2517

SEQ ID NO: 212625 - DNA, 600 bp, Canis familiaris
tctggaatcctgaccctgaatcttgccaaggggacgttgtaccaggaagtgaacctcgtggtaatgagagcaaatagttctcagaacaatctgacctgtgaggtgctgggacccacctcccctgagctgacactgagcttgaatctgaaagagcaggctgccaaggtctcaaagcagcagaagctggtatgggtggtggatcctgaggggggaacgtggcagtgtctcctgagtgacaaggacaaagtcctgctggcatccagcctcaatgtttcatccccagtggtcatcaagtcctggccaaagttcttggctatcacgctgggcgggatcttaggccttctgcttctaattgggctttgcgtcttctgctgtgttaagtgctggcgccgcaggcgccaggcagagcggatgtctcagatcaagagactcctcagtgagaagaagacctgccaatgctcccaccggatccagaagacgtgtagtctcatttgaggcgcggggccaggtggagcttccggcttgcaagctcaccggctgtcctcccctgcctttcctgctgggctcctgggcctgcggacagatgaatgtagcgaaccc

SEQ ID NO: 212626 - DNA, 684 bp, Canis familiaris; identical to SEQ ID NO: 2519

SEQ ID NO: 212627 - DNA, 590 bp, Canis familiaris; identical to SEQ ID NO: 2520

SEQ ID NO: 212628 - DNA, 625 bp, Canis familiaris; identical to SEQ ID NO: 2521

SEQ ID NO: 212629 - DNA, 669 bp, Canis familiaris; identical to SEQ ID NO: 2522

SEQ ID NO: 212630 - DNA, 678 bp, Canis familiaris; identical to SEQ ID NO: 2523

SEQ ID NO: 212631 - DNA, 665 bp, Canis familiaris; identical to SEQ ID NO: 2524

SEQ ID NO: 212632 - DNA, 1400 bp, Canis familiaris
cagctggatggcattctgaagtaccacacggagatcgtgtttgccaggacctctcctcagcagaagcttatcattgtggaaggctgccagagacagggggctattgtggctgtaactggtgatggcgtgaatgactctccagccttgaagaaggcagacattggggttgccatggggattgttggctccgacgcgtctaagcaagctgccgacatgattcttctagatgacaactttgcgtcaattgtgactggagtagaagaaggtcgtctgatctttgataacttgaagaaatccattgcctacaccctgaccagtaacattccagagatcacccccttcctgatatttattattgcaaacattccactaccactggggactgtcaccatcctctgcattgacttgggcacagacatggtccctgctatctccctggcttatgagcaagctgagagcgacatcatgaagagacagcccagaaaccccaaaacggacaagcttgtgaatgagcggctgatcagcatggcctatggacagatcggtatgatccaggccttggggggcttcttcacttactttgtgattctggctgagaacggcttcctcccgacccacctgctgggcctccgagtggactgggatgaccgctggatcaacgacgtggaggacagctatgggcagcagtggacctacgaacagaggaaaatcgtggagttcacttgccacacggccttcttcgtcagtatcgtggtggtgcagtgggctgacttggtcatctgtaagaccaggaggwactcagtcttccagcaggggatgaagaacaagatcctaatatttggcctctttgaagagacggcccttgctgctttcctgtcctactgccctggaatgggtgttgccctgaggatgtaccccctcaaacctacctggtggttctgtgcckttccctactctsttctcatsttcgtgtacgacgaagtccsrwaactcatcatcaggcgacgccctggcggctgggtagagaaagawacctactactagacccccgtgtcctgcacgtygtgrakcawcwtgccacacactttgcacccaccacccaccccctctttgkgkacttcagtcttggaattcggaactytacccctggtaggaaagcatccgaagcatgtgggggaagcaagacgtcctggaatgaagcatgtagctatatgggggggaggggggagggctgcctgaaaaacatcgtctatgggaatgacagtggggatggtttttatgtgcctttttgtttttgtaaaaaggaaaacttggaaagactgaaagaatacattttatatctggatttttacaaataaagatggctattataatggraaaaaaaaaaaaaaaaaaaaaaa

SEQ ID NO: 212633 - DNA, 695 bp, Canis familiaris; identical to SEQ ID NO: 2526

SEQ ID NO: 212634 - DNA, 695 bp, Canis familiaris; identical to SEQ ID NO: 2527

SEQ ID NO: 212635 - DNA, 600 bp, Canis familiaris
aggaatgagaccagcagtttcaatcacaccattcccaagtgcaaagtccaggtcaacttggtgtatggcttggtggatgggctggtcaccttctacctgccgctgctggtcatgtgcatcacctactaccgcatcttcaagattgcccgggaccaggccaagaggatccatcacatgggctcctggaaggcagctaccattggggagcacaaagccacagtgacactggctgcagtgatgggagccttcatcatatgctggttcccctactttactgtgtttgtttaccgtgggctgaaaggggatgatgccatcaatgaggcttttgaagccgtcgttctgtggctgggctatgccaactcggccctgaaccctatcctgtatgccacactgaacagagacttccgcacgscwtaccagcagctcttccgctgcaggmcggccagccacaatgcccaggaaacttctctgaggtcgaacagctctcagctggccaggaatcaaagccgagaacccatgcggcaggaagagaagcccctgaagctccaggtgtggagtgggacagaggtcacagcccctcgaggagccacagacaggtaa

SEQ ID NO: 212636 - DNA, 658 bp, Canis familiaris; identical to SEQ ID NO: 2529

SEQ ID NO: 212637 - DNA, 767 bp, Canis familiaris; identical to SEQ ID NO: 2530

SEQ ID NO: 212638 - DNA, 688 bp, Canis familiaris; identical to SEQ ID NO: 2531

SEQ ID NO: 212639 - DNA, 643 bp, Canis familiaris; identical to SEQ ID NO: 2532

SEQ ID NO: 212640 - DNA, 266 bp, Canis familiaris; identical to SEQ ID NO: 2533

SEQ ID NO: 212641 - DNA, 628 bp, Canis familiaris; identical to SEQ ID NO: 2534

SEQ ID NO: 212642 - DNA, 764 bp, Canis familiaris; identical to SEQ ID NO: 2535
  misc_feature (262)..(262): n is a, c, g, or t

SEQ ID NO: 212643 - DNA, 617 bp, Canis familiaris; identical to SEQ ID NO: 2536
  misc_feature (12)..(12): n is a, c, g, or t

SEQ ID NO: 212644 - DNA, 625 bp, Canis familiaris; identical to SEQ ID NO: 2537

SEQ ID NO: 212645 - DNA, 675 bp, Canis familiaris; identical to SEQ ID NO: 2538

SEQ ID NO: 212646 - DNA, 700 bp, Canis familiaris; identical to SEQ ID NO: 2539

SEQ ID NO: 212647 - DNA, 638 bp, Canis familiaris; identical to SEQ ID NO: 2540

SEQ ID NO: 212648 - DNA, 638 bp, Canis familiaris; identical to SEQ ID NO: 2541

SEQ ID NO: 212649 - DNA, 655 bp, Canis familiaris; identical to SEQ ID NO: 2542

SEQ ID NO: 212650 - DNA, 595 bp, Canis familiaris; identical to SEQ ID NO: 2543

SEQ ID NO: 212651 - DNA, 621 bp, Canis familiaris; identical to SEQ ID NO: 2544

SEQ ID NO: 212652 - DNA, 639 bp, Canis familiaris; identical to SEQ ID NO: 2545

SEQ ID NO: 212653 - DNA, 658 bp, Canis familiaris; identical to SEQ ID NO: 2546

SEQ ID NO: 212654 - DNA, 681 bp, Canis familiaris; identical to SEQ ID NO: 2547

SEQ ID NO: 212655 - DNA, 681 bp, Canis familiaris; identical to SEQ ID NO: 2548

SEQ ID NO: 212656 - DNA, 631 bp, Canis familiaris; identical to SEQ ID NO: 2549

SEQ ID NO: 212657 - DNA, 638 bp, Canis familiaris; identical to SEQ ID NO: 2550

SEQ ID NO: 212658 - DNA, 622 bp, Canis familiaris; identical to SEQ ID NO: 2551

SEQ ID NO: 212659 - DNA, 748 bp, Canis familiaris; identical to SEQ ID NO: 2552

SEQ ID NO: 212660 - DNA, 696 bp, Canis familiaris; identical to SEQ ID NO: 2553

SEQ ID NO: 212661 - DNA, 720 bp, Canis familiaris; identical to SEQ ID NO: 2554

SEQ ID NO: 212662 - DNA, 678 bp, Canis familiaris; identical to SEQ ID NO: 2555
  misc_feature (16)..(16): n is a, c, g, or t

SEQ ID NO: 212663 - DNA, 889 bp, Canis familiaris; identical to SEQ ID NO: 2556

SEQ ID NO: 212664 - DNA, 667 bp, Canis familiaris; identical to SEQ ID NO: 2557

SEQ ID NO: 212665 - DNA, 620 bp, Canis familiaris; identical to SEQ ID NO: 2558

SEQ ID NO: 212666 - DNA, 1217 bp, Canis familiaris; identical to SEQ ID NO: 2559

SEQ ID NO: 212667 - DNA, 610 bp, Canis familiaris; identical to SEQ ID NO: 2560

SEQ ID NO: 212668 - DNA, 634 bp, Canis familiaris; identical to SEQ ID NO: 2561

SEQ ID NO: 212669 - DNA, 616 bp, Canis familiaris; identical to SEQ ID NO: 2562

SEQ ID NO: 212670 - DNA, 649 bp, Canis familiaris; identical to SEQ ID NO: 2563

SEQ ID NO: 212671 - DNA, 681 bp, Canis familiaris; identical to SEQ ID NO: 2564

SEQ ID NO: 212672 - DNA, 672 bp, Canis familiaris; identical to SEQ ID NO: 2565

SEQ ID NO: 212673 - DNA, 832 bp, Canis familiaris; identical to SEQ ID NO: 2566

SEQ ID NO: 212674 - DNA, 700 bp, Canis familiaris; identical to SEQ ID NO: 2567
  misc_feature (174)..(174): n is a, c, g, or t

SEQ ID NO: 212675 - DNA, 620 bp, Canis familiaris; identical to SEQ ID NO: 2568

SEQ ID NO: 212676 - DNA, 668 bp, Canis familiaris; identical to SEQ ID NO: 2569

SEQ ID NO: 212677 - DNA, 867 bp, Canis familiaris; identical to SEQ ID NO: 2570

SEQ ID NO: 212678 - DNA, 671 bp, Canis familiaris; identical to SEQ ID NO: 2571

SEQ ID NO: 212679 - DNA, 677 bp, Canis familiaris; identical to SEQ ID NO: 2572

SEQ ID NO: 212680 - DNA, 1400 bp, Canis familiaris
cttctcctcccggatcttggcagatcaccccctcagcagggtctgcgcatcgccgccagcatgaagctggttcccgtcgccctcttatacctgggctccctcgccttcttgggcgcggacaccgcacggctagacgtggcgtcagagttccgaaagaagtggaataaatgggctgtaagtcgtggaaagagggaacttcgagtgtccagcagctatcccaccgggctcgctgaagtgaaggccgggccggcccagactcttattcggacccaggacgtgaagggcgcctctcgcaacccccagaccagcggtccggacgccgcccgcatccgagtcaaacgctaccgccagagtatgaacaatttccagggcccgcggagcttcggctgccgcttcggaacgtgcacggtgcagaaactggcgcaccagatctaccagttcacagacaakgacaaggacggcgtcgcccccaggagcaagattagccctcagggctacggccgccggcgccggcgctccctgcccgagcccggccttcgccggactctgttgttcccggagccacggccaggcggggctccggccccccgggcgcatcaggtgctcgccaacctccttaagatgtaggcgcctgtggcagcagcgaactggcgcgcgtgtgcatcccgctggcttccccctgggcggagggcttccccgagccgagcccctctgccgatggaagtcgggcagagaccgggattccgggaggcaccgtcccgcggccagccctggctttgcgcgagccccttctcctcggaggcacggatccctctgtcccaagccggcccaggtgtcccgtggggggcagaggaatgcaagggaggcctgccaggctcacggagaggattaactgagaattaaatgagaattaaatgcttgagaccctcccccctccccccccagggacaggggtctgagtcactgccgtgcctgcccacaaactgatttctcacggggtgtcaccccaccggggcgcaagcctcactattacttgaactttccaraacctagagaggaaaagtgcaatgcgtgttgtatatacagaggtaactatcaatatttaagttcgttgctgtcagaagattttttttgtaacttcaaatatagagatatttttgtacgttatatattgtattaagggcatttaaaaaccattgcattgtccccctccccacttattttaatacgtgaatgtctcagcgaggtgtaacgttgtttttgctgcagagtgtgtgagtgtgcgtgrgagacttattacctcttgtggaagaaggaacaccgtgtctctgcattatctatttacataaaatgggtgatatgcgaaaatagcaaatcaawaawaaacggtctcgatgctg

SEQ ID NO: 212681 - DNA, 632 bp, Canis familiaris; identical to SEQ ID NO: 2574

SEQ ID NO: 212682 - DNA, 668 bp, Canis familiaris; identical to SEQ ID NO: 2575

SEQ ID NO: 212683 - DNA, 598 bp, Canis familiaris; identical to SEQ ID NO: 2576

SEQ ID NO: 212684 - DNA, 1400 bp, Canis familiaris
ccacggtgagctgccygctggggtacctggcctcggctgtcaccaacgactgtggctgcaccacaacaacctgcttccctgacaaggtgtgtgtccaccgaggcaccatctaccctgtgggccagttctgggaggaggcctgtgacgtgtgcacctgcacggacttggaggactctgtgatgggcctgcgtgtggcccagtgctcccagaagccctgtgaggacaactgcctgtcgggcttcacttatgtccttcatgaaggcgagtgctgtggaaggtgtctgccatctgcctgtgaggtggtcatcggttcaccacggggcgacgcccagtctcactggaagaatgttggctctcactgggcctcccctgacaacccctgcctcatcaatgagtgtgtccgagtgaaggaagaggtctttgtgcaacagaggaatgtctcctgcccccagctgaatgtccccacctgccccacgggcttccagctgagctgtaagacctcagagtgttgtcccacctgtcactgcgagcccctggaggcctgcttgctcaatggtaccatcattgggcckgggaaaagtctgatgattgatgtgtgtacaacctgccgctgcaccgtccaggtgggagtcatctctggattcaagctggagtgcaggaagaccacctgtgaggcatgccccctgggttataaggaagagaagaaccaaggtgaatgctgtgggagatgtctgcctatagcttgcaccattcagctaagaggaggacagatcatgacactgaagcgtgatgagactatccaggatggctgtgayagtcacttctgcaaggtcaatgaaagaggagagtacatctgggagaagagagtcacgggttgcccacctttcgatgaacacaagtgtctggctgagggaggraaaatcatgaaaattccaggcacctgctgtgacacatgtgaggagccagaatgcaaggatatcattgccaagctgcagcgtgtcaaagtgggagactgtaagtctgaagaggargtggacattcattactgtgagggtaaatgtgccagcaaagccgtgtactccatccacatggaggatgtgcaggaccagtgctcctgctgctcgcccacccagacggagcccatgcaggtgcccctgcgctgcaccaatggctccctcatctaccatgagatcctcaatgccatgcaatgcaggtgttcccccaggaagtgcagcaagtgaggccactgccctggatgctactgtcgcctgccttacccgacctcactggactggccagagtgctgctcagtcctcctcagtcctcctcctgctctgctcttgtgcttcctgatcccacaataaaggtcaatctttcaccttgmaaaaaaaaaaaaaaaa

SEQ ID NO: 212685 - DNA, 673 bp, Canis familiaris; identical to SEQ ID NO: 2578
  misc_feature (22)..(22): n is a, c, g, or t

SEQ ID NO: 212686 - DNA, 1025 bp, Canis familiaris; identical to SEQ ID NO: 2579

SEQ ID NO: 212687 - DNA, 712 bp, Canis familiaris; identical to SEQ ID NO: 2580

SEQ ID NO: 212688 - DNA, 698 bp, Canis familiaris; identical to SEQ ID NO: 2581

SEQ ID NO: 212689 - DNA, 585 bp, Canis familiaris; identical to SEQ ID NO: 2582

SEQ ID NO: 212690 - DNA, 699 bp, Canis familiaris; identical to SEQ ID NO: 2583

SEQ ID NO: 212691 - DNA, 630 bp, Canis familiaris; identical to SEQ ID NO: 2584

SEQ ID NO: 212692 - DNA, 674 bp, Canis familiaris; identical to SEQ ID NO: 2585

SEQ ID NO: 212693 - DNA, 634 bp, Canis familiaris; identical to SEQ ID NO: 2586

SEQ ID NO: 212694 - DNA, 604 bp, Canis familiaris; identical to SEQ ID NO: 2587

SEQ ID NO: 212695 - DNA, 1400 bp, Canis familiaris
aaacttgaacatcmtgactaaaagktccaacmaaactgctgctaccaatgaggttcctgaggtgactgtgttttccaagtctcctgtgatgctgggtcagcccaacaccctcatctgtctcgtggacaacatctttcctcctgtgatcaatgtcacrtggttgaagaataggcaytcmgtsacagaaggggtttctgaaaccagcttcytygccaaaggggatcattccttctcaaagatcagttacctcaccttcctaccttctgctgaggatatttatgactgcaaagtrgagcactggggcctggatgagccacttctgaaacactgggaacctgaggttccaacccctatgtcagagctgacagagactgtggtctgtgccctggggttggctgtgggccttgtgggcatcgtgatgggcaccgtcttcattatccaaggcctgcgctcaggtggtacttccagacatcaaggacctttgtgagctgcacctagaaggaaggtgcactgcatgcccacctcccagagcagaagagtggacctgataggccacctagcactatttccttgcccagttcatcatactcctactctctaccaatgcttctctgtcacctcttctctgggactcaagaactatatcctctgagtgctaaccctttaaattctaccccttccttgactgcctgtttttgtttgtttgttttcttttcttttctcaattgtcaactacaatgagatctctgggatatcccaaccagttacctgatccctcattactctgatctagcattcccatggaaataattattttctctttaagagatcctttagatcaatttttcctgtctttcatctcagggctgattaggactttggtccccccttttattataccttcctaatctcactttccatattatgtttcatgcccagcaacaccagaaaatgcaggtataggctgataatattttgatatcttaggtaaggataatggttctctcttcctgttattctcatgtttgggtactgccacactcccccaattcagacaccaagaaaagtaatataagccctctgaccttggtgtaaatttggtatagaagaaatacaaagccaagaaataagttcatacttcttttaacataattttagaaagctatgacagagaaataagttaagataaagaaattttgaatttcaaagtaccaaaagacaaactgttttccaaaactttaaaatttcaatttgtgaagaatgaatgatgataggagaagctttcctctcccatcctcacccatgaaaagataagaattctttaggcaggaaaataaatggaagtcgggtaagagagcattagaataagaccataaagtaagtaactgaggacaggtact

SEQ ID NO: 212696 - DNA, 536 bp, Canis familiaris; identical to SEQ ID NO: 2589

SEQ ID NO: 212697 - DNA, 638 bp, Canis familiaris; identical to SEQ ID NO: 2590

SEQ ID NO: 212698 - DNA, 642 bp, Canis familiaris; identical to SEQ ID NO: 2591

SEQ ID NO: 212699 - DNA, 669 bp, Canis familiaris; identical to SEQ ID NO: 2592

SEQ ID NO: 212700 - DNA, 683 bp, Canis familiaris; identical to SEQ ID NO: 2593

SEQ ID NO: 212701 - DNA, 602 bp, Canis familiaris; identical to SEQ ID NO: 2594

SEQ ID NO: 212702 - DNA, 747 bp, Canis familiaris; identical to SEQ ID NO: 2595

SEQ ID NO: 212703 - DNA, 702 bp, Canis familiaris; identical to SEQ ID NO: 2596

SEQ ID NO: 212704 - DNA, 676 bp, Canis familiaris; identical to SEQ ID NO: 2597

SEQ ID NO: 212705 - DNA, 662 bp, Canis familiaris; identical to SEQ ID NO: 2598

SEQ ID NO: 212706 - DNA, 691 bp, Canis familiaris; identical to SEQ ID NO: 2599
  misc_feature (54)..(54): n is a, c, g, or t

SEQ ID NO: 212707 - DNA, 742 bp, Canis familiaris; identical to SEQ ID NO: 2600

SEQ ID NO: 212708 - DNA, 605 bp, Canis familiaris; identical to SEQ ID NO: 2601

SEQ ID NO: 212709 - DNA, 620 bp, Canis familiaris; identical to SEQ ID NO: 2602

SEQ ID NO: 212710 - DNA, 617 bp, Canis familiaris; identical to SEQ ID NO: 2603

SEQ ID NO: 212711 - DNA, 658 bp, Canis familiaris; identical to SEQ ID NO: 2604

SEQ ID NO: 212712 - DNA, 636 bp, Canis familiaris; identical to SEQ ID NO: 2605

SEQ ID NO: 212713 - DNA, 668 bp, Canis familiaris; identical to SEQ ID NO: 2606

SEQ ID NO: 212714 - DNA, 621 bp, Canis familiaris; identical to SEQ ID NO: 2607

SEQ ID NO: 212715 - DNA, 618 bp, Canis familiaris; identical to SEQ ID NO: 2608

SEQ ID NO: 212716 - DNA, 617 bp, Canis familiaris; identical to SEQ ID NO: 2609

SEQ ID NO: 212717 - DNA, 681 bp, Canis familiaris; identical to SEQ ID NO: 2610

SEQ ID NO: 212718 - DNA, 638 bp, Canis familiaris; identical to SEQ ID NO: 2611

SEQ ID NO: 212719 - DNA, 668 bp, Canis familiaris; identical to SEQ ID NO: 2612

SEQ ID NO: 212720 - DNA, 594 bp, Canis familiaris; identical to SEQ ID NO: 2613

SEQ ID NO: 212721 - DNA, 647 bp, Canis familiaris; identical to SEQ ID NO: 2614

SEQ ID NO: 212722 - DNA, 637 bp, Canis familiaris; identical to SEQ ID NO: 2615

SEQ ID NO: 212723 - DNA, 680 bp, Canis familiaris; identical to SEQ ID NO: 2616

SEQ ID NO: 212724 - DNA, 680 bp, Canis familiaris; identical to SEQ ID NO: 2617

SEQ ID NO: 212725 - DNA, 679 bp, Canis familiaris; identical to SEQ ID NO: 2618

SEQ ID NO: 212726 - DNA, 643 bp, Canis familiaris; identical to SEQ ID NO: 2619

SEQ ID NO: 212727 - DNA, 658 bp, Canis familiaris; identical to SEQ ID NO: 2620

SEQ ID NO: 212728 - DNA, 658 bp, Canis familiaris; identical to SEQ ID NO: 2621

SEQ ID NO: 212729 - DNA, 635 bp, Canis familiaris; identical to SEQ ID NO: 2622

SEQ ID NO: 212730 - DNA, 635 bp, Canis familiaris; identical to SEQ ID NO: 2623

SEQ ID NO: 212731 - DNA, 798 bp, Canis familiaris; identical to SEQ ID NO: 2624

SEQ ID NO: 212732 - DNA, 664 bp, Canis familiaris; identical to SEQ ID NO: 2625

SEQ ID NO: 212733 - DNA, 614 bp, Canis familiaris; identical to SEQ ID NO: 2626

SEQ ID NO: 212734 - DNA, 615 bp, Canis familiaris; identical to SEQ ID NO: 2627

SEQ ID NO: 212735 - DNA, 666 bp, Canis familiaris; identical to SEQ ID NO: 2628

SEQ ID NO: 212736 - DNA, 666 bp, Canis familiaris; identical to SEQ ID NO: 2629

SEQ ID NO: 212737 - DNA, 637 bp, Canis familiaris; identical to SEQ ID NO: 2630

SEQ ID NO: 212738 - DNA, 756 bp, Canis familiaris; identical to SEQ ID NO: 2631

SEQ ID NO: 212739 - DNA, 601 bp, Canis familiaris; identical to SEQ ID NO: 2632

SEQ ID NO: 212740 - DNA, 623 bp, Canis familiaris; identical to SEQ ID NO: 2633

SEQ ID NO: 212741 - DNA, 664 bp, Canis familiaris; identical to SEQ ID NO: 2634

SEQ ID NO: 212742 - DNA, 664 bp, Canis familiaris; identical to SEQ ID NO: 2635

SEQ ID NO: 212743 - DNA, 349 bp, Canis familiaris; identical to SEQ ID NO: 2636

SEQ ID NO: 212744 - DNA, 656 bp, Canis familiaris; identical to SEQ ID NO: 2637

SEQ ID NO: 212745 - DNA, 638 bp, Canis familiaris; identical to SEQ ID NO: 2638

SEQ ID NO: 212746 - DNA, 635 bp, Canis familiaris; identical to SEQ ID NO: 2639

SEQ ID NO: 212747 - DNA, 635 bp, Canis familiaris; identical to SEQ ID NO: 2640

SEQ ID NO: 212748 - DNA, 637 bp, Canis familiaris; identical to SEQ ID NO: 2641

SEQ ID NO: 212749 - DNA, 654 bp, Canis familiaris; identical to SEQ ID NO: 2642

SEQ ID NO: 212750 - DNA, 661 bp, Canis familiaris; identical to SEQ ID NO: 2643

SEQ ID NO: 212751 - DNA, 654 bp, Canis familiaris; identical to SEQ ID NO: 2644

SEQ ID NO: 212752 - DNA, 638 bp, Canis familiaris; identical to SEQ ID NO: 2645

SEQ ID NO: 212753 - DNA, 874 bp, Canis familiaris; identical to SEQ ID NO: 2646

SEQ ID NO: 212754 - DNA, 637 bp, Canis familiaris; identical to SEQ ID NO: 2647

SEQ ID NO: 212755 - DNA, 619 bp, Canis familiaris; identical to SEQ ID NO: 2648

SEQ ID NO: 212756 - DNA, 629 bp, Canis familiaris; identical to SEQ ID NO: 2649

SEQ ID NO: 212757 - DNA, 685 bp, Canis familiaris; identical to SEQ ID NO: 2650

SEQ ID NO: 212758 - DNA, 701 bp, Canis familiaris; identical to SEQ ID NO: 2651

SEQ ID NO: 212759 - DNA, 698 bp, Canis familiaris; identical to SEQ ID NO: 2652

SEQ ID NO: 212760 - DNA, 605 bp, Canis familiaris; identical to SEQ ID NO: 2653

SEQ ID NO: 212761 - DNA, 654 bp, Canis familiaris; identical to SEQ ID NO: 2654

SEQ ID NO: 212762 - DNA, 702 bp, Canis familiaris; identical to SEQ ID NO: 2655

SEQ ID NO: 212763 - DNA, 733 bp, Canis familiaris; identical to SEQ ID NO: 2656

SEQ ID NO: 212764 - DNA, 682 bp, Canis familiaris; identical to SEQ ID NO: 2657

SEQ ID NO: 212765 - DNA, 786 bp, Canis familiaris; identical to SEQ ID NO: 2658
  misc_feature (122)..(122): n is a, c, g, or t

SEQ ID NO: 212766 - DNA, 610 bp, Canis familiaris; identical to SEQ ID NO: 2659

SEQ ID NO: 212767 - DNA, 639 bp, Canis familiaris; identical to SEQ ID NO: 2660

SEQ ID NO: 212768 - DNA, 678 bp, Canis familiaris; identical to SEQ ID NO: 2661

SEQ ID NO: 212769 - DNA, 696 bp, Canis familiaris; identical to SEQ ID NO: 2662

SEQ ID NO: 212770 - DNA, 675 bp, Canis familiaris; identical to SEQ ID NO: 2663

SEQ ID NO: 212771 - DNA, 649 bp, Canis familiaris; identical to SEQ ID NO: 2664

SEQ ID NO: 212772 - DNA, 1400 bp, Canis familiaris
aatccctgggagggaggggggtcactcttcaagttaaaggattggatgaatgttcataaccatacatggagatctttgtaattacaacaaaatcacttccctctcctcacagtgaaatagcagtgggcatttgagggggttttgctttcttgctttattgctgctttttttttttttttagaatttttcccctattgcaaggagtttttaaatgccacaagacttcatttaaaataacccttgggaaggtgtgtaagacagcctcatcatggtgtgctcctggtaaatatctacccagaagcccatgaactgtgtttccctacttcacatttctctacaactaattccacacaggtttgtaaggggggaaggtagatggattcacatgttccaaagggtactccaaacccttgctggtgggtgaggaaggttagagatacaaacattgttcaaaaagagaataacccaagaggactaactggtaggaacaagctttactctatcatcttcttggcctttcatttgttttcattcattcattcactagaaatcaccatgtgacctattattttgcaaatctgttacctcttagatcaagtatcattaacttttgcagagtgggttttgtctattattttattaatgacaattaacatccaacatggcttctcatgctatttctacctcactttggttttggggtgttcctaataatcgtgcacacctgatttcacagcttcactacttgtccatcatgtgaacatttttctccattttttcccccactgtcatttccaaaggaaaacccaaagctctaaggtaacagaatgacatgaagatttggttttggtcttgcattttttctcctttatgtgacactggactttttctttccccgcagattttttttttaaccatgatttaaaacaaggggttgtgttacttctactaagcagttttaagtttcattctaaaagcagaggtaaatagcgtgcataattttattttaatcttttcattttatcttttagacattagttctggagtgagtctgtcaaaatatttgaataaaaattgagagctttattgctacgttttaagcataatttggacattattccgtgttctttataaccaccaagtattaaactgtaaatcataatgtaactgaagcataaacatcacgtggcatgttctgtcattgttttcaggtactgggttcttgagtatcataatatattgtgttttaacaccaacactgtaacatttactaattatttttttaaacttcagttttactgcattttcacaacatatcagacttcaccaaatatatgccttactattgtattatattactgctttactgtgtatctcaataaagcacgcagttatgttac

SEQ ID NO: 212773 - DNA, 656 bp, Canis familiaris; identical to SEQ ID NO: 2666

SEQ ID NO: 212774 - DNA, 927 bp, Canis familiaris; identical to SEQ ID NO: 2667

SEQ ID NO: 212775 - DNA, 625 bp, Canis familiaris; identical to SEQ ID NO: 2668

SEQ ID NO: 212776 - DNA, 637 bp, Canis familiaris; identical to SEQ ID NO: 2669

SEQ ID NO: 212777 - DNA, 692 bp, Canis familiaris; identical to SEQ ID NO: 2670

SEQ ID NO: 212778 - DNA, 695 bp, Canis familiaris; identical to SEQ ID NO: 2671

SEQ ID NO: 212779 - DNA, 666 bp, Canis familiaris; identical to SEQ ID NO: 2672
  misc_feature (10)..(10): n is a, c, g, or t

SEQ ID NO: 212780 - DNA, 627 bp, Canis familiaris; identical to SEQ ID NO: 2673

SEQ ID NO: 212781 - DNA, 615 bp, Canis familiaris; identical to SEQ ID NO: 2674

SEQ ID NO: 212782 - DNA, 714 bp, Canis familiaris; identical to SEQ ID NO: 2675

SEQ ID NO: 212783 - DNA, 697 bp, Canis familiaris; identical to SEQ ID NO: 2676

SEQ ID NO: 212784 - DNA, 600 bp, Canis familiaris
gatggccctgccctgctccttctcggtggccctggtgctgctcagctgccactccctgtgctgtctggcttgccacctgcccgacacccacggcctgcgcaactggagggtcctgacgctcctgggacagatgaggagactctccgccggctcttgtgaccactacaccaatgactttgccttccccaaggagctgtttgatggccagcggctccaggaggcgcaggccctctctgtggtccacgtgatgacccagaaggtcttccacctcttctgcccggacacgtcctctgctccttggaacatgactctcctggaggaactgtgctcggggctctctgagcagctggatgacctggaggcctgtcccctgcaggaggcggggctggccgagacccccctcatgcatgaggactccaccctgaggacctacttccaaaggatctccctctacctgcaagacaggaaccacagcccgtgtgcctgggagatggtccgagcagaaatcgggagatccttcttctcctcgacaatcttgcaagaaagaatcaggaggaggaaatgagacccgcccggatccgtcgacctgcagccaagctt

SEQ ID NO: 212785 - DNA, 600 bp, Canis familiaris
ggactggagccctccgaggaggagccccccaagtctccactggcaccctcagagggcgctggctctgacgtgtttgatggtgacttgggaatgggggcagccaaggggctgcagagccttccctcacaggaccccagccctctccagcggtacagtgaggaccctacggtacccttgccccctgagactgatggtaaggttgcccccctgacctgcagcccccagcctgaatatgtgaaccagccagaagtttggccgcagcccccccttgccctagaaggccctttgcctccttcccgaccggctggtgccactctggaaaggcccaagactctgtcccccaagactctctcccctggcaagaatggggttgtcaaagacgtttttgcctttgggagtgctgtggagaatccggagtacctggcaccccggggcagagctgcccctcagccccaccctcctccagccttcagcccagcctttgacaacctgtattactgggaccaggatccatcagagcggggctctccacccagcacctttgaagggacccctacagcagagaacccggagtacctggggctggacgtgccagtgtga

SEQ ID NO: 212786 - DNA, 600 bp, Canis familiaris
ttttgaccagtgcctgatgattctcaatagtccaggcaatcagattctcagtggcctctccattgaagaatataagaccacgctgaaaataatcaagcaagctattttagccacagacctagcattgtacattaagagacgaggagaattttttgaacttataagaaaaaatcaattcaacttggaagatcctcatcaaaaagagttgtttttagcgatgctgatgacagcttgtgacctgtctgccattacaaaaccgtggcctattcaacaacggatagcagaacttgtagcaactgaattttttgaccaaggagacagagagagaaaagaactcaacatagagcctgctgatctaatgaacagggagaagaaaaacaaaatcccaagtatgcaagttgggttcatagatgccatctgcttgcaactatatgaggctctgacccacgtatcagaggactgcttccctttgctggatggctgcagaaagaacaggcaaaaatggcaggccctagcagaacagcaggagaaaacgctgattaatggggaaagcagccaggccaagcggaactgagtggcctatttacgtggagttgaagt

SEQ ID NO: 212787 - DNA, 600 bp, Canis familiaris
gacttgaggtgagatacgactgcagataaaaggtaaaatgaatcatcatttttctttgtcagagcaagtatagagaatagttttaactgtataaacagcaaaggactatcctgctattggggtcaaaaattaaagtgagagagcaggaaggtaagaaggcttagccctgaattaaacgtaagagtactgagtttgcaattgagaaactgccctttttttcagttcataggactggtcagctcagtatcacggaagtttgggtgtgtatactaaatgcttaccctgagccatatagttgttgatatttacttctcatagattttaattttagcacatatagaaaatcctaacattgtcttagatttgagcctgtttgagtggattcccattgatcgtgtgtaccctaaataccaatttattcattattggagaagtagatagtgaatctagcaactggttcaggaaaggaaaatctattccaaatatatgctaatgtttggactcagggaaagtaggaagagagctgtttgtgtgatttgttaaccacccgtgccaaaaaaatgtttctgagtttcagtcactaaattgggtggagaattc

SEQ ID NO: 212788 - DNA, 1400 bp, Canis familiaris
aaaacagacacatagatcagtggaacagaatagagaacccagaagtggaccctgaactttatgggcaactaatcttcgataaaggaggaaagactatccattggaagaaagacagtctcttcaataaatggtgctgggaaaattggacatccacctgcaggaggatggaactagacccctctctttcaccctacacaaagatgaactccaaatggatgaaagatctaaatgtgagaccagattccatccaaatcctagaggagaacacaggccacaccctttttgaaatcggccaccgtaacttcttgcaagatacatccacgaaggccaaagaaacaaaagcaaaaatgaactattgggacttcatcaagataagaagcttttgcacagcaaaggatacagtcaacaaaactaaaagacaacctacagaatgggagaagatatttgcaaatgacgtatcagataaagggctagtttccaagatctataaagaacttattaaactcaacaccaaagaaacaaacaatccaatcatgaaatgggccaaagacatgaacagaaatttcacagagggagacatagacatggccaacatgcacatgaggaaatgctttgcatcaattgccatcagggaaatacaaatcaaaaccacaatgagataccacctcacaccagtgagaatggggaaaattaacaaggcaggaaaccacaaatgttggagaggatgcggagaaaagggaacccttttacactgttggtgggaatgtgaactggtgcagccactctggaaaactgtgtggaggttcctcaaacagttaaaaatatacctgccctatgacccagcaattgcactgttggggatttaccccaaagatacaaatgcaatgaaacgccgggacacctgcaccccgatgtttatagcagcaatggccacgatagccaaactgtggaaggagcctcggtgtccaacgaaagatgaatggataaagaagatgtggtttatgtatacaatggaatattactcagctattagcaatgacagatacccaccatttgcttcaacgtggatggaactggagggtattatgctgagtgaagtaagtcagtcggagaaggacaaacattatatgttctcattcatttggggaatataaataatagtgaaagggaatataagggaagggagaagaaatgtgtgggaaatatcagaaagggagacagaacgtaaagactgctaactctgggaaacgaactaggggtggtagaaggggaggagggcggggggtgggagtgaatgggtgacgggcactgggggttattctgtatgttagtaaattgaacaccaataaaaaataaattaaaaaaaaaagatgaaaccacagaaaaaaaaaaaaaaaaaa

SEQ ID NO: 212789 - DNA, 578 bp, Canis familiaris; identical to SEQ ID NO: 2682

SEQ ID NO: 212790 - DNA, 69 bp, Canis familiaris
ctgctgtcggcttcttgctcttagtccttggcctcaaggctctggagctgtggatgcagttgcacgagg

SEQ ID NO: 212791 - DNA, 1323 bp, Canis familiaris; identical to SEQ ID NO: 2684

SEQ ID NO: 212792 - DNA, 261 bp, Canis familiaris; identical to SEQ ID NO: 2685

SEQ ID NO: 212793 - DNA, 600 bp, Canis familiaris
caggagagaagatgactctaagcatctctgtcctgctgtctctaaccgtgttcctcctggtcatcgtggagctgatcccttccacctccagcgccgtgcccttgattgggaagtacatgctgttcaccatggtgtttgtcatcgcgtccatcatcatcaccgtcatcgtcatcaacacacaccaccgctcccccagcacccacgtcatgcccgactgggtacgcaaggtttttatcgacactatcccaaatatcatgttcttctccacaatgaaaagaccatccagagaaaaacaagacaaaaagatttttacggaagacattgacatttctgacatttctgggaagccagggcctccacccatgggtttccactctcccctgatcaaacatcccgaggtaaaaagtgccattgaaggagtcaaatacatcgcagagacgatgaagtcagaccaggagtccaataatgcggctgaggaatggaagtatgttgcaatggtgatggaccacatcctccttggagtcttcatgctcgtctgtatcattggaaccctggctgtgtttgcaggtcgactcattgaattaaatctgcaaggatgac

SEQ ID NO: 212794 - DNA, 600 bp, Canis familiaris
gctgctctgtcacagggaactctgggggaactccgggtggctcgggcagaatttgggaagaacttcacccacattccccggtccgtagactgggcccaggctggcggtggcctgctcgaccttggcatctactgcatccagttcatctctatggtctttggtgggcagaagccggagaagatttcagccgtgggaaggcgctatgaaacaggtgtggacgacaccgtcactgtgctcctccagtacccaggagggatccatggcagctttacctgcagcatctctgctcagctctctaatatggcctttgtgagcggtaccaagggcataggccagatccttgacccttgctggtgcccaacggagctggtgttgaagggagagcataaggagttcccactgcccccggccccaagcaaggagttcaattttacaaatggagcaggcatggcttatgaggccaagcatgtccgggagtgcctgcgaaagggcctgaaggaaagtcctgtgattcccctggcagaaagtgaactcctggctgacatccttgaagaaataaggaaggccattggagtcaccttcccccaagacacacgctaa

SEQ ID NO: 212795 - DNA, 600 bp, Canis familiaris
gctggtctctgagaggctggagggggaagacaagatgagggccacgaaggtggggatgatgctgaacttcttgggcttccacatgtataggatgctgagcgagtctcagaacgcagccagtgggaccatcctgtccccaacgacgctctttggcaccctggcatctttctacttgggcgcactggaccccacggccagcagactgcaggctttcctaggcgtcccggggaggatcagggctgcacctcccggctggatggccacaaggtcctctctgccctgcagactatccagagccttctggtggcccagggtggggctagtggccagtccacgccgctcctgtccacggtggtgggcctgttcacagcccctggcctgcgcctgaagcagccgtttgtgcgggccctggctccctttgcccccatcaccttcccgcgctctctggacttgtccatggacccagatcttgctgctgagaagatcaacaggttcatgcaggcagtgacagggtggagaatggacagacccatgtcaggaatcagcccagacagcaccctacttttcaacacctacgtcccacttccaaggaaagatgaa

SEQ ID NO: 212796 - DNA, 1400 bp, Canis familiaris
gcatctggggattcttcagcacaggggatgaacatggccgcggaaactggggtcacttggaccagttggctgcacttcgctgggttcaggagaacattgccaactttggagggaatccaggttctgtgaccatcttcggagagtcggcgggaggtgaaagcgtgtccgttcttgtgctatctcctctggccaagaacctcttccatcgggccatctctgagagtggtgtggccctcactgctgccttggttaagaaagacatgaaggacacagctcagcaaattgctgtctttgctgggtgtaaaagcaccacgtcggctgtccttgttcattgcctgcgccagaagacggaagatgagctcttggaggtttcactgaagttgaaatttttcactcttgatttatttggagaccccagagagagctatcctttcctgcctacggtggttgatggagtgctgctgccaaagatgccccaagagattctggctgaaaagaaattcaactctgttccctacatcatcggaatcaacaagcaggagtttggctggcttcttccaatgatgatgggttacccactctctgaagacaagctggaccagaagacggcctcgtcactcttgtggaagtcctaccccattgctaacatccctgaggaactgactccactggctagtgagaagtatttaggaggaacagatgaccctgtcaaaaagaaagccctgttcttggacatgttaggagatgtggtgtttggtgtcccatccgtgactgtagcccgtcaccacagagatgccggagcccccacctacatgtatgagttccagtatcatccaagcttctcatcggacatgaaaccccagaccgtggttggggaccacggggatgagctcttctcagtcttcggggccccatttttaaaagggggtgcctcagaagaggagataagactcagcaagatgatgatgaaactatgggccaacttcgctcggagcgggaaccccaatggggaagggctgccctcttggcccgcctacgaccagaaggaagggtacctgcagattggaatccccactcagccagcccagaagctgaaaagcaaggaaatggctttctggactgagctcctggccaagcgggcagcagaaaagctgagtcccacagagcacgtcgagctgtgaatgggcggctgcctgcctcggggcctggggagccagacagggctattctacagagggtgtctatgagccaaagagggatcttactgtggaggttgggatggtctggtggaggagggaagaggtctgggagagggaattgtggcttcaatttggggaataaatgttcttttggatcaaaaaaaaaaaaaaaaaaaaaaaaaaaaaaaaaaaaaaaaaaaa

SEQ ID NO: 212797 - DNA, 600 bp, Canis familiaris
gtagtaaaatttattctcaacgatatatgatttttcaactactaaaggaataatttttgcttattttaagtcttaaattctactataactttttcataggcttaacattgacaataagtgataaactagtaacagaatacttatgaaatacaactgtttctgaaagtgttggctttttaattctaatttgttgagatctattggatataatgatggtggaacataagattagaaaggctgagaattactgagtgagggtaaacaattgtaaacaacatagctttcattacattgtcagttttattatgaagacaaaaataaaagcagaatatatatcatcttctctgaaaaacactaaatgttgaccatatgcatctgtatgatatactcgaaatgatttgttttaagtaactaaatatattaattacattaaattctcaagttgtattttttaaaagtatgtgaggccatgatgattttatcataaaataactattctgaaatttttaagtcaaagcaatcttaccttaatccactgatgttggtatctggggtaggtcatttgtctggtgattcaaaactaaataagatattccaaag

SEQ ID NO: 212798 - DNA, 445 bp, Canis familiaris; identical to SEQ ID NO: 2691

SEQ ID NO: 212799 - DNA, 742 bp, Canis familiaris; identical to SEQ ID NO: 2692

SEQ ID NO: 212800 - DNA, 1196 bp, Canis familiaris; identical to SEQ ID NO: 2693

SEQ ID NO: 212801 - DNA, 600 bp, Canis familiaris
aatctgtgagctctatgccaaagtgctaggatcccaagaagctttacaacccgtacactatgaagagaagaactggtgcgaggagcagtactccgggggctgctataccgcctacttcccccctgggatcatgactcactacggaagggtgatccgccagccatttggcaggatttactttgctggcactgagacggcaacacactggagcggttatatggaaggagctgtagaggctggggaacggacagctagagaggtcttaaatgctctcgggagggtggcagagaaagacctgaagacccaggaacctgaatcaaaggatgttccagctatggaaatcacccacaccttctgggagaggaacctgccatcggtgacaggcctgctgaagctcattggatttaccacatcagtaactgccctgtggattgtggcgtacaaattcaggctgctgagacgatcctgagtcttcagccccacactctctgcttactcttccccagcaccatcaaaagcaaaatgtcgacaaaggctgtgtcattggaccatctttaaatgcactgatttaaagtttaagtcttagtcagtgtcataagt

SEQ ID NO: 212802 - DNA, 1400 bp, Canis familiaris
  misc_feature (1333)..(1333): n is a, c, g, or t
aatgttggacatcattccctttctcaggttttttcccaacccaggcctctggaggctgaagcgagccttggagaaccgggaccacatcgtagagaagcagctgaggcagcacaaggagagcatggtggcaggccagtggagggacatgaccgactacatgctccagagggtggggaggctgagagcagaagagggctgtggacagctcctcgaaggacacgtgcacatgtccgtggtggaccttttcattggcggcaccgagaccacggccaccaccctctcctgggccgtggcgttcttgcttcaccaccctgagattcagcagcgactgcaggaagagctggatcgggagctgggtcctggagcttcaggctcccgaatcccgtacagagaccccacacgcctgcccctgctcagcgccaccgttgccgaggtgctgcgcctgcggcccgtcgtgcccctggccctgccgcactgcaccacgcggcccaacagtatctcgggctacgacatccccgagggcatggttgtcatacccaacctgcaaggcgcccacttagacgagacggtctgggagcggccacaggagttccggcccgatcgcttcctggtccccggcgccagccccagagtgctggccttcggctgcggggcgcgtgtgtgcctgggggagccgctggcacgccttgagctcctggtggtgctggcgcagctgctccgggccttcacgctgatgcccgctgcgggcaccctgccctctctgcgaccccgggcccgctgcggcgtcaacctcagcatgcagcctttccaggtgcagctgcagccccggggggcaggagtcctgggacgtggccagcacccatgacaggcaggacacacgacggctgtgtgcttcagtttctccttttatttctcccgtacaaaccccgtccctcccccctgtaaacatggtgctgtgagatcgcagatggagaaggctccctcctccggtggctggatagtgagggtggcccctggctcttctctcagcgcgacccctcagtgctcggcagtcatactggggcgccggagatgtgagctgtggtcagcctccctgggctgctgggggccggtagcttcttggtctgagcttcatttccgtgaagggcacagagaactcgaaacccttccagtagtaccagctcaccccctgggaaaggattgttgagacagagtcagagccagacagacgtcccatctgctccccagcctacaccctgcaccccggcatctggggagatggttcccagaaatcaatcaccctccccccgcacccacttcatgatcctcaacngcaaaggccggaggcttagtttaagctggccctttacatccaataaatcgtactcatgtctccctcg

SEQ ID NO: 212803 - DNA, 408 bp, Canis familiaris; identical to SEQ ID NO: 2696
  misc_feature (29)..(29): n is a, c, g, or t
  misc_feature (44)..(44): n is a, c, g, or t
  misc_feature (253)..(253): n is a, c, g, or t
  misc_feature (344)..(344): n is a, c, g, or t

SEQ ID NO: 212804 - DNA, 1400 bp, Canis familiaris
ctacccttctctggagattgggacctgagaagaaccatgaagtggctgctgctgatcagcttggtggcactctctgagtgcgctatcgtcaaggttcccctggtcagaaagaagtccttgaggcagaacctgatcgagcatggcctcctaaatgacttcctgaagaaccagagccccaacccagccagcaagtacttcccccaagagcctactgtgttggccactcagtccctaaagaactacatggatatggagtacttcggcaccatcggcatcggcactcctcctcaggagttcaccgtcatctttgacaccggctcttccaacctgtgggtgccctcggtctactgctccagtcctgcctgctccaaccacaaccgcttcaaccctcaggagtcctccacctaccagggcaccaaccggccagtctccatcgcctacggcaccggcagcatgacaggcatcctgggatacgacaccgtccaggttggaggcatcgcagacaccaatcagatctttggcctgagcgagactgagcccggctctttcctgtactatgctcccttcgacggcatcctgggtctggcctaccctcagatttcagcttctggagctacacccgtctttgacaacatgtggaacgaaggtctggtttcccaagaccttttctcggtctacttaagtagcgatgaccagagtggcagcgtggtgatgtttggtggcatcgattcttcttactacagtggaaacctgaactgggtgcccgtttctgtcgagggttattggcagatcaccgtggacagtgttaccatgaacggacaggccatcgcttgcagtgatggctgccaggccattgttgacacaggcacctctctgctggctggaccaaccaatgccattgccaacatccagagctacattggagccagccagaactcatacggccagatggtgatcagctgctcagccatcaacagcctgcctgacatcgtcttcaccatcaacggcatccagtaccctctgcctcccagtgcctacatcctacagagccaacagggctgtgtcagcggcttccagggcatgaacctccccaccgcctccggagagctgtggatcctgggtgatgtcttcatccgccagtactttgccgtgtttgacagggcaaacaaccaggttggcctggctcccgtggcctgagcctgcatctctcctgccacgtcccaggaggagctagccttagctgcccactctagatgtacataattctcccgattgttcttcctatgggattgtggaggaggagtctcgacccaattccctgtcattaccaataacgtagaataaaaacctcacctcctgaaaaaaaaaaaaaaaaaaaaaaaaaaaaaaaaaaaaaaaaa

SEQ ID NO: 212805 - DNA, 474 bp, Canis familiaris; identical to SEQ ID NO: 2698

SEQ ID NO: 212806 - DNA, 600 bp, Canis familiaris
aaccgtaactacctattcaaccaatatagaattttttttcaatttttgtcatgcattaatggtttgccccatgcatataagcatgtacatgctattattaatattacataaggacatacattcaaacgcttatccattccaaaataaaatgaatcatgctcctcacccagtccagaagggcttaatcaataagcctcaagaaaccatcaatccttgcacaaagtatccctcttctcactccaggcccatactacatgggggtttctagcctgaaactatacctggcatatggttcttacttcaggaccatataattctttactcctatccttcaaccctctcaaatggaacatctcgatgtccaatcagcccatgatcatacataactgtggtgtcatgcatttggtatcttttaagttttagtgggggggacagatatcactcagctatgaccataaaggtctcgacgcagtcaaataacttgtagctggacttaattaatatcatataccagcatcacataaccataaagtataattcagtcaatggttacaggacatacaaatttatacacacgtacacatacacatacacgtacac

SEQ ID NO: 212807 - DNA, 600 bp, Canis familiaris
atcatattagctgtactaaaacacgagaggagacaagttgtaacaaggtaagcacactagaaggtgtgcttggattaaccaaagtgtagctttattaaagcatctggcttacacccagaagatttcatacctcatgaccattttgaacaaaagctagcccaactaaccctaaaccaaaacaccataacactacaatataaaacattcagttaaaccataaaagtataggaaatagaaattctaattggagctattgagatagtaccgtaagggaatgatgaaagacgttttaaaagtacaaaacagcaaagattaccccttttaccttttgcataatgaattagccagaaataacaaagagaacttaagctaagtcccccgaaatcagaggagctacctatgaacaatctagaaggatcaactcatctatgtcgcaaaatagtgagatttataggtagtggtgaaaagcctaacgagcctggtgatagctggttacccataaacagaattttagttcaactttaaatttgcctaaattacctaaaaaattaaaattttaatgtaaatttaaaatatattctaaaaaggtacagcatttta

SEQ ID NO: 212808 - DNA, 600 bp, Canis familiaris
caaaccccgggtaccccccataaacttatattatttacaatatacctatttgtgtccaaccaaacctccaaaacaggactaagtaaatgtaacagtcataagccatgtctaaatttcatacgattatattataaccctagttaatttaacaaaataatttcatacgcctaaatctgcaatctatctatagataggacttccttgactccaccccctccatttaattcacaaaaaaattcaaacccatattctcacaacacaatgtataacaccataaaaacacctgttaatgtagcttaataaataaaacaaggcactaagaatgccaagatgagtcataagactccataaatacaaaggtttcttcttagccttcctattagtccttagtaagcttacaaatgcaattctccacgccccagtgagaatgccctcaaaatcactaacgatttaaaggagcgggtatcaagcacacgctaaagtagctcataacaccttgctaagccacacctccacgggatacagcagtgataaaaattaagcgatgaaaggaaagtttgactaagctatattaaagagggttggtaaatttagggccat

SEQ ID NO: 212809 - DNA, 600 bp, Canis familiaris
aattaacccaaattcatgggcaatatctacttaccaggcataacatttcaccattattgtgggttaacatttaggttggggtgacctcggaatataaaaaaactcccaagtgattaaaatttatttaccagtcaaaatataacatcatttattgatccaatagtttttgatcaacggaacaagttaccctagggatagcagcgcaatcctattcaagagtccatatcaacaatagggtttatgacctcgatgttggatcaggacatcttaatggtgcagcagctattaagggtttgttcaacaattaaagtcctacgtgatctgagttcagaccggagtaatccaggacggtttctatctatttaacaatttctcccagtacgaaaagacagagaaataaggcctaccttacaaaagtgccttaaaactaatagatgaaattaagctcaatctaaccagtttatctcccgcataagcccaagaaaggagggctttgttagggtggcagagcccggtaattgagtaaaacttaaacctttatccccagaggttcaactcctctccctaacatcatgttcttttatgtaagttttctctctt

SEQ ID NO: 212810 - DNA, 600 bp, Canis familiaris
aaaaaaacttccaagtgattaaaatgtagacttaccagtcaaaatataatatcatttattgatccaatagtctttgatcaacggaacaagttaccctagggataacagcacaatcctattcaagagttcatatcgacaatagggtttacgacctcaatgttggatcaggacatcctaatggtgcagcagctattaagggttcgtttgttcaacgattaaagtcctgcatgatctgagttcagaccggagtaatccaggttggtttctatctatttaacaatttctcccagtacgaaaggacaagagaaataaggcctaccttacaaaagtgtcttaaaactaatagatgaaattaagctcaatctaaccagtttatctccccataagcccaagaaaggagggctttgttagggtgacagagcctggtaattgtgtaaaacttcaacctttatccccagaggttcgactcctctccctaacatcatgttctttatcaatattatctcagtaattgttccaattctcctcgccgtagcctttcttactcttgttgaatgaaaagtcctaggctatatacaactccgaaaaggccccaatatt

SEQ ID NO: 212811 - DNA, 600 bp, Canis familiaris
taataaatggatccttcacactatccatacttatcattactcaagaacacatatgactaattttccctgcctgacccctggccataatatgatttatctctaccttagcagaaacaaaccgagcccccttcaacctaaccgaaggggaatctgagctagtttctgggtttaatgtagaatatgcagcaggcccatttgccctattttttctagcagagtacgcaaacattattataataaatattcttacaacaatcttatttttcagcacatttcacaacccactcataccagagctctactctatcaacttcatcattaaaacactcctaaccatttctttcctatgaatctgagcatcataccctcgattctgctacgaccaactaatacacctcctatgaaaaaactttctaccattaaccctagccctgtgtatatgacatgccgccctacccattatcactgcaagcattccaccccaaacataagaaatatgtctgacaaaagagttactttgatagagtaaataatagaggtttaagtcctcttatttctagaataataggctttgaacctaatcctaagaattcccagatc

SEQ ID NO: 212812 - DNA, 600 bp, Canis familiaris
gacctgaaatgggaactgcgccacgcgggccagggccggcagcggcaggtcgccgcggtggccgtgggcgtggtcgtgctcgtcctgctgctgctgctcgggctggggggcgcgcactgctacaggactaagaagttgtcatcaaaaaatttaaagaatccttatgaagagccaagcagagagggtagcagtagcaggccttcagacagcgaggctaggatggcctcttttccccaaccttggtttgtggttataaaggaacatcaaaatctcaggaatggaagtcaacctatggccctcaaggatggtgagtcagcagatgttagccaattttcctctccagagccagggtcagtaaaacggacctcatggagaaatgaacaccagttatataaggacacagagcaaggctgctgcactccaccatccagtaatagaggcaccggctctcagtcaatggagcagagcttttctgtcccctcctatgaggcacagcccattgctttgggggttgagaagccacagtctctcctatcagctaaacccttattgcaacaaagggccccagatccaccacaccaaatgaagctgattcagtga

SEQ ID NO: 212813 - DNA, 466 bp, Canis familiaris; identical to SEQ ID NO: 2706

SEQ ID NO: 212814 - DNA, 1252 bp, Canis familiaris; identical to SEQ ID NO: 2707

SEQ ID NO: 212815 - DNA, 1400 bp, Canis familiaris
tcaccctttatgcagtgatctttctgatgagtgttggaggaaatgtgctcatcatcgtggtcctgggactgagtcgccggctgaggactgtcaccaacgccttcctgctctcactggcagtcagcgacctcctgctggctgtggcttgcatgcccttcaccctcctgcccaatctcatgggcacgttcatctttggcacagtcgtctgtaaggcagtttcctacctcatgggggtgtctgtgagtgtgtccacactaagccttgtggccatcgccctggagcgatacagcgccatctgccggccgctacaagcacgcgtgtggcagacgcgttcccatgcggctcgtgtgatcatcgccacttggatgctctctggactgctcatggtgccctacccggtgtacaccgccgtacagcccgcaggaggggcccgggcgctgcagtgcgtgcatcgttggcccagtgcgcgtgtccgccaaacctggtcggtactgctgctcctgcttttgttcttcgtcccaggcgtggttatggctgtggcctacgggctcatctcccgcgagctctacttagggcttcgcttcgacgaggacagcgacagcgaaagccgagtccgaagccaaggagggctgcggggtggggcgggaccaggtcctgccccccccaatgggagttgccggccggagggcgggctggctggcgaggacggcgacggctgctacgtgcagcttccgcgctcgcgtcagaccctggagctgtccgcgctgaccgcgcccactcctgggcccggaggtggcccccggccctaccaggccaagctgttggccaagaagcgcgtggtgcggatgctgctggtgatcgtcgtgctttttttcctgtgttggttgccactgtatagtgccaacacgtggcgtgccttcgacagctctggtgcacaccgcgcactttcaggagcgccaatctctttcatccacttgctgagctacgcctcagcctgcgtcaaccccctggtctactgcttcatgcaccgtcgcttccgccaggcctgccttgagacgtgtgcccgctgctgccccaggcctccacgagctcgcccccggccccttccagacgaggaccctcccaccccttccattgcttcactgtccagactgagctacaccaccatcagcacgctagggcctggctgaggggtagggggagagtggaggctgagacgggacacacccattcctacaggcagggacccacccagacacacaagagaggtagatccactgacaaaggagactacaccccaaagcatggactaatcccaaagcacacacaaacacacacatatacacaagtggcttacttgacacaaaagaaacaaaggagactcccacacaggaaataaa

SEQ ID NO: 212816 - DNA, 600 bp, Canis familiaris
tgtgagctgaagatcctggactttggactggcccgacatacagatgatgaaatgacaggctatgtggctaccaggtggtacagggctcctgagataatgctgaactggatgcattacaaccagacagttgatatttggtcagtgggatgcataatggccgaactgttgactggaagaacgttgtttcctggtacagaccatattgatcagttgaagctcattttaagactcgttggaaccccaggggctgatcttttgaagaaaatctcctcagagtctgcaagaaactacattcagtctttgacccagatgccgaagatgaactttgcaaatgtatttattggtgccaatcccttggctgtcgacttgctggagaagatgcttgtattggactcagacaagagaattacagcagcccaagccctcgcacatgcctactttgctcagtaccatgatccagatgatgaaccagtggctgatccttacgatcagtcctttgaaagcagggacctccttatagatgaatggaaaagcctgacctacgatgaagtcgtcagctttgtgccgccaccccttgaccaagaagagatggagtcctga

SEQ ID NO: 212817 - DNA, 1400 bp, Canis familiaris
ggaagcagatggataccactttgtattttcagatgtgtgtttagtaagtgttattcacctacatccagctctctattatacatctcttaagttaaaataatttacttaagctgagctgtgaaaaaactctgcagtatggttaagctttggggggatttttttaaggggatctaaaaaaagtttttagaacatgtaaaatgtttaatgggaaaagttagttctgtaaagtaatgctgtactattagttttaattgagtttagtacttttaaaaacaacactctgctgctattttaaagaggtcaaccaaaaccttttaacagagttgatgatattgtgttaacttatgtgaaattgtactagacaatcccatatccttactctatctcactccctaactaaattttctcactagaataaatcttatattccttatttaatttgttgataaaactcttggcttatataatattccaatttatagatagttcccaaattatatagtatgatatatttttctagcttcaaaatttagcaatatactatttatgataagccatttctgtgtgtttgctatatagtaatacctggtttaaaaaatctctaaatagaaccaaagcattcttagacagggataaacttgctatggcaagatagagaattttttttctcatttctaaattcagtgttgatatgagctcactaaagtgaaactagatatgacaaaattgttcaaggactattccctgttgattactcaaatttcccaaggtattacaaaatccaagaatagtcaacttccaacacttttcaaagggagctaaggagtgaactattttatcagagctattttgctctatgttatagtagatgatgtcaatattttcaaagccacaatatacatcttattttacatctgtagtctatgtgaaattttgatagtctgtagcatgtcaaaatgcagaggtgtaaataaagtcatttacagggactcttttatttctttctcccatttggggaggggggagcttccattaatgatggataatctttccagaaataaagtcaagatgtatttattgaaatatgcttgattatgctggatccaggagtttgaaggaataaaaataattactagttaattaattcaagggaatggtatctgaccaaaagtagcttctgtgtcactttgatttctcatcagaagtgttttttaaagactctggatatcttccaaaaaaattttttagattgtctaacaaatgccagagtgaccatctttaataactgttgttatgaagatccattagtaaaaaaccatggaagatataaaaaatgacagtattagttgtcaatttttctaggaagatactttcaaataaattttttgtcaggattacaa

SEQ ID NO: 212818 - DNA, 600 bp, Canis familiaris
tccttttgctgctcactctactgattctctcattctctctccaagaaattaataaatacccttaacaagttttggtaaaatatcaaggaaaattctgattgctgtttggatccagaagcaaaaccttgatacctctacagagcacttaaggagacaaaagggattttggctgaggagtgactctcagagtccagaatctcatagatctcttgatttccattgagagggctcattcgaggacttcctgtgatgaggcaactgagtcaaatggagcaccagatggagtccctaacccgaaactggtccctaaccctaacctgaacacaaaccccaacttgatccctaatacctaatctaacatgaaccttgaccctaaccctaatatgagccataatacaaaccagacccaaactcaaaacccaaccctaatccaaactctaacctgaactttagtcaaaccctaacctaaaacctaatctgacccaaacctgaaaaagaaaccataaacctaaacctaaccctaaaccctaatccttaaccctaactagaacaagtgccctattctgaaccccaagtctaacactaacccgaacccaggac

SEQ ID NO: 212819 - DNA, 600 bp, Canis familiaris
ggttaggtttgtccctaggtgtcttatgggttttggtgcaattgtaagtggaactgatttcttggtttctctctctgctgcctcattattggggtatagaaatgcaacagactctataccttgattttgttatcccgcaactttactgaactcaggtattaattgtgggaattgtttggaggagtcttttaggttttctacatagagtatcatgccacctgtgaatagtggaggtttgacttcttccttgatgatttggaagtcttttatttctttgtgttttgttgttgttgtgactatgacttctggtcctacattaaataactgtggtgagagtggacattcctgtcttattcctgaccatagaggaaaagctcttggtttctccccaccgaggatgacattagctgtgagtctttcctaaacggcctttatgatgatgcggtatgttccctctatccccactttctagagggttttttttatcaagaatagatgcatctactgagggaaccatatagtccttatcctatcttttattaaagtggcgtatcatgttgatcgattttgaaatattgaaccaaccctgcaacccaggac

SEQ ID NO: 212820 - DNA, 600 bp, Canis familiaris
cagaatgtaacacttgacgcgttcaaggacaaatacgtgtgctttgataaatttccatcggactcccataggttgtcctatacaactctcctcttgatgctgcagtattttggtccactctgttttatatttatttgctacttcaagatatatatacgcttgaaaaggagaaacaacatgatggacaagatgagagacaataagtacaggtccagtgaaaccaaaagaatcaacatcatgctgttgtccatcgtggtagcgttcgccgtgtgctggttgcctctcaccatcttcaacactgtgtttgactggaatcatcagattatcgccacgtgcaaccataacctgttattcctgctgtgccaccttacggccatgatatccacttgtgtcaaccccatattttacggatttctgaacaaaaatttccagagagacttgcagttcttctttaacttttgtgatttccggtctcgggatgatgactatgagacgatagccatgtctaccatgcacacagatgtttctaagacttctttgaaacaagcaagcccagtcgcatttaagaaaatcaacaatgatgataatgaaaaaatctga

SEQ ID NO: 212821 - DNA, 274 bp, Canis familiaris; identical to SEQ ID NO: 2714
  misc_feature (48)..(48): n is a, c, g, or t
  misc_feature (85)..(85): n is a, c, g, or t
  misc_feature (140)..(140): n is a, c, g, or t
  misc_feature (184)..(184): n is a, c, g, or t

SEQ ID NO: 212822 - DNA, 271 bp, Canis familiaris; identical to SEQ ID NO: 2715
  misc_feature (2)..(2): n is a, c, g, or t
  misc_feature (15)..(15): n is a, c, g, or t
  misc_feature (89)..(89): n is a, c, g, or t

SEQ ID NO: 212823 - DNA, 600 bp, Canis familiaris
tgcaagattcccatgcagtttcctggagaagatggacccttgtcctccagaagtttgttttttttgttttttgttttttgttttttacgtgtgctcatggatgagcaaaagaactagaggtcatcattccttcattcagtatgtataattgaacctcactgcgtcagtgtgtgtggggaggcagatgtgccaactcagccagtgtgaataggggtcctgcaaaggttggttcagagacagtgtgtagggaagagccatcagttatgctgtgggggaagtgcaggggtcctggaagtcttcctagaggagatcagtttcgaacgaggcctttgagaataagaaagtctagtggaatggaataaagggaagaacattttaggctggggacactaaagggacaaaggtagaggggctcaggtttttttgtttgtttgtttgctttgttttcgtttttttagcagggctgctattggcattttggccaggactgtgataggacactgcccactccttagttacactgcaaggggtttatgtcccttctctacctaacaccctatgtgacaaccagagcctttcaaacatttctaacggccccag

SEQ ID NO: 212824 - DNA, 714 bp, Canis familiaris; identical to SEQ ID NO: 2717

SEQ ID NO: 212825 - DNA, 572 bp, Canis familiaris; identical to SEQ ID NO: 2718

SEQ ID NO: 212826 - DNA, 600 bp, Canis familiaris
atgccccagttaaatttgttgaaatatgactgaatcgggaaaattaaccttattccatgttgaaaaattgggctatgagggcatttccttttaaaagggattttcccccggcccccctgtcccccttatctgggttcttttttaaattaggcctttttaaattttttattttggaaggttattccttgtccaaccatccgccaaaatattttttaaaaacttttcattaaatttcttgggatttaggattttaagtgtagcactcctatctttcaaccttctggaggtcaccctaacctaggaaggaaggcagggataacatttattttcctgcgtgaagtgacataatttcctaagccatatattaaaattttctctcagatttttggttggattttatgtcaggcttccatttgtactctgaactgtttgtatgcctctattgtgttatattaatctatgtgtctcaccctacatcagtagtacatttgatttttaatttttttatttctaatttctattaacaatggctctgtggcaagttgtgttctctatgaccagcaattgccctctctttaacctttttacaacgagtgactc

SEQ ID NO: 212827 - DNA, 600 bp, Canis familiaris
gcccccgttaaagttgttaaaataatgaatgaatccggaaaatttaacctttttaaattttgaaaaattggtctattgaggcatttccttaaaaaaggaattaatcctcggccccctggcccctttaacggggtccttttttaaaattagtcatattagacattttattttggaaagttattcctgtcccaaccatcaccaaaaatatttttataaacttttcattagatttcttgggatttaggatttgaaggtagcactcctatcttttcaacccttgtggaggtcaccctaacctaggaaggaaggcagggacaacatttattttccctgtgtgaagtgacataatttcctaagccatatattaaaattttctctcagatttttggttggattttacgtcaggcttccatttgtactctgaactgtttgtatgcctctattgtgttatattaatctatgtgtctcaccctacatcagtagtacattgtatttttactttttttatttctaatttctattaacaatggctctgtggcaagttgtgttctctatgaccagcaattgccctctctttgacctttttacaacgagtgactc

SEQ ID NO: 212828 - DNA, 600 bp, Canis familiaris
ttgtcccaaacagcctgcctcatgcagtgacctgtgacgttaaatttagaaactatgtcatccccaagggcacaactatattaatatcactgtcttctgtgctatctgatgaaaaagaattccccagaccagagatatttgaccctgcccacttcctggatgatagcggcaacttcaagaagagtgactacttcatggctttctcagcaggaaaacgaatttgtgtgggagaaggactggcccgcatggagctgtttttattcctgaccaccattttacaaaaatttaccctgaaacctctggtcgatccaaaggacattgataccaccccacttgccagtgggtttggccatgtcccacccacctaccagctctgcttcattcccgtgtgaggaaaggcagaccacctgcctgctgttgtgctattgtctgtagatcctcttcctctggggtatcattcatctccctctcactactggggwtgctttccccgaccttatctcatatttccccattccttccattcccagtgaacatccaacctccattaaaggaaagtctccagaatttctttgcaaaaaaaaaaaaaaaaaaaaaaaa

SEQ ID NO: 212829 - DNA, 160 bp, Canis familiaris; identical to SEQ ID NO: 2722

SEQ ID NO: 212830 - DNA, 600 bp, Canis familiaris
gtgctgcttttcaaggaggagatgcaacgggccaacaaggactggctgcagggggaagcgcccagcgtggaagcaggggaggccaaactagggcttgacggccaccagcaggaggagctctggctgttcgtgaggaacaggttgatggccgagcaagaaaacggaaatctccgaggaagccctggccctaaaggtgacatgggaagtcaaggccctaaaggagaccgagggctccccgggactccaggcatccctggggtcttgggccacccgggtccacaaggaccaaagggacaaaaaggcagtgtgggagaaccaggcatggagggacccatgggccaaaaagggcgagaaggccccatgggacctcgtggtgaaccagggcctcctggatttggagagaaaggggacagaggggctgctggtgaacccggtgttcagggcccacctggcgtcccaggatctgtgggtcccaaaggttctggcggttctccaggcccacggggtcccccaggccctatgggtccacaagggctccgaggtgaagttggactccctggtatcaaaggtgacaaaggacctctgggatcaccaggaccc

SEQ ID NO: 212831 - DNA, 233 bp, Canis familiaris; identical to SEQ ID NO: 2724

SEQ ID NO: 212832 - DNA, 1400 bp, Canis familiaris
atgatgaatgagtcatatggtgagccaccatttaaaataagctaccccactactcatcaagtctaaccagagccccaatgtaactttgacccaagtcccttcagctgtatgatgaaattgcttctcttcaagagaaaaaaaaaaaaaaatgcctggggccggaaagcacatgcatttttctaaagcaccctgtggcttggttggagaggacactaccattaacagaagggccttttatcacagttgccactccattgtcagtgaccaaattgtcccatttgtctccatcaaaagcactgcagccacactggattttaaaggacctcatgaagggcttctctctgctcagcctgatggctcttttctggcaattgaaatgcaaagttcttttctatcaaatggctacataaggacaggaaaaacctattagaatgtgctcagagcacaactgtgatcttgaatgttttcagatgctccttttctcttctttaaaaaaaaaacaaccttttttttttcttacagccattaaataataatagctcatgggcaaaattattgggactataaaacttgttgttatgtgctatgactaaccatacaacatctttttctcatttaccacctgactgcttccaaacatgttcatccccctatccattctccatcaaagcctcctcctttggaaacctcccttgagtccatcaggcagatgtgagtactttttgtagggatgaattatacttgaggccaggacccatgatttctctcctgccattctcaatatctcataaaatgcctggtgcaaggtaggcattgaatacatatttggtgaacagatgttgaaaggatgcttcaaaaaatcaattacagctgtaagtagtagattaaatgaggtataagttatgagaatatatatttttaaataatggttattgatgggtctgtagccaaacaataattatactgatgaccatttttttctttagactttatgaaatatgtgacttgaacagactctgagctgggagagggggacatatatatttctctgagctgggagagggggacatatatatttcttgacaatccaaacacgtttgtatcagagcttacgttgagtcttaacccagttcataccaccaatgaaaggatcaatcagcaagcatctacaagaatagccatcagtgccctgatctagtgcccatctagtgccctagatctgagaaagatggaatgagccacagtcaagttacatgcccaacctggaaagaagtggcatggtgtggaagagtgaagtttgagttctgaatgactcgtgttaaaataaatctatacaaggaattaaattaagaatatcactcttctcaaactctgaccagatagttctgtggccctattct

SEQ ID NO: 212833 - DNA, 127 bp, Canis familiaris
accaatcaatcctgaagttactgaacaatggagaaaaaagacaggtctggatatctacgaaggatatggacagactgaaacggtgctgatctgtggaaattttaagggaatgaaaattaagcctggt

SEQ ID NO: 212834 - DNA, 248 bp, Canis familiaris; identical to SEQ ID NO: 2727

SEQ ID NO: 212835 - DNA, 600 bp, Canis familiaris
ggaggtggctggggccaacctcatggaggtggctggggtcagccccatggtggtggctggggacagccacatggtggtggaggctggggtcaaggtggtacccacagtcagtggaacaagcccagtaaaccaaaaaccaacatgaagcatgtggcaggagctgctgcagctggagcagtggtagggggcctcggtggctacttgctgggaagtgccatgagcaggcctcttatacattttggcaatgactgtgaggaccgttactatcgtgaaaacatgtaccgttaccccaaccaagtgtactacaggtcagtggatcagtataataaccagagcacctttgtgcatgactgtgtcaacatcacagtcaagcaacacacagtcaccaccaccaagggggagaacttcaccgaaactgacatcaagatgatggagcgagttgtggagcaaatgtgcatcacccagtaccagagagaatccgaggcttattaccaaagaggggcaagtgtgatcctcttctcctcccctcctgtgatcctcctcgtctctttcctcatttttctcatagtaggataggggcaaccttcctgttttcattat

SEQ ID NO: 212836 - DNA, 153 bp, Canis familiaris; identical to SEQ ID NO: 2729

SEQ ID NO: 212837 - DNA, 160 bp, Canis familiaris
gatggcgcttgacaagatcgcctttgtgcccttcagctacctggttgaccagtggcgctggagggtatttgatggaagcatcaccaaggagaactacaaccaggagtggtggaacctcaggctgaagtaccagggcctctgccccccagtggcccgttct

SEQ ID NO: 212838 - DNA, 525 bp, Canis familiaris; identical to SEQ ID NO: 2731

SEQ ID NO: 212839 - DNA, 600 bp, Canis familiaris
gacatgcagctcctactgctgaccgtgggcctggcactgatctgtggcctccaggctcaggagggaaaccatgaggagccccagggaggcctagaggagctgtctgggaggtggcactccgttgccctggcctccaacaagtccgatctgatcaaaccctgggggcacttcagggttttcatccacagcatgagcgcaaaggacggcaacctgcacggggatatccttataccgcaggacggccagtgcgagaaagtctccctcactgcgttcaagactgccaccagcaacaaatttgacctggagtactggggacacaatgacctgtacctggcagaggtagaccccaagagctacctgattctctacatgatcaaccagtacaacgatgacaccagcctggtggctcacttgatggtccgggacctcagcaggcagcaggacttcctgccggcattcgaatctgtatgtgaagacatcggtctgcacaaggaccagattgtggttctgagcgatgacgatcgctgccagggttccagagactagggcctcagccacgcagagagccaagcagcaggatctcacctgcctgagtacggt

SEQ ID NO: 212840 - DNA, 107 bp, Canis familiaris
tggaggagagccgcgcgcagctgggcttcctgcagctgcataactggatcgacaacaggagccgcgccgtgttcgtggagctcacgcgctacagcccagccgtgggg

SEQ ID NO: 212841 - DNA, 600 bp, Canis familiaris
tacatgctgaacaaacctgtggatgacatcatcatggagaatggcaaggtggtgggtgtgaagtctgagggagaggtggcccgctgcaagcagctgatctgtgaccccagctacattccggaccgagtgcggaaggccggtcaggttatccgcatcatctgtatcctcagccaccccatcaagaacaccaatgatgccaactcctgccaaatcattatcccccagaaccaagttaacaggaagtcagacatctacgtgtgcatgatctcctacgcacacaacgtggctgcacagggcaagtacatcgccattgccagcaccacagtggagacagctgagccggagaaggaggttgagcctgccctggagctcctggagcccattgaccagaagtttgtggccatcagtgacttatacgagcccattgatgacggttctgagagccaggtgttctgttcctgctcctatgatgccaccacacacttcgagacaacctgcaatgacatcaaagacatctacaagcgcatggcaggctccgcctttgactttgagaacatgaagcgcaaacagaatgacgtgtttggagaagctgaccagtga

SEQ ID NO: 212842 - DNA, 600 bp, Canis familiaris
ggcacctacatgctcaataaacccattgaagaaatcattgtgcaaaatggcaaagtgattggtgtgaaatctgaaggagaggttgctcgctgcaagcagctcatctgtgaccccagctacgtcaaagaccgggtagagaaggtgggccaggtcatcagggttatctgcattctcagccaccccatcaagaacaccaatgacgccaactcctgccagatcatcatcccccagaaccaggtcaatcggaagtcagacatctacgtgtgcatgatttcctctgcacacaatgtggccgcgcaagggaagtacatcgccatagtgagcacgacggcggagaccaaggaacctgagaaggaaatcagaccagctttggagcttctggaaccaattgaacagaaatttgttagcatcagcgacctccttgtacccaaagacctggggacggaaagccagatctttatttcccgcacgtacgatgctacaactcactttgagaccacctgtgacgatattaaaaacatctacaagaggatgaccggctccgagtttgactttgaggaaatgaagcgcaagaagaacgacatctacggggaagactag

SEQ ID NO: 212843 - DNA, 94 bp, Canis familiaris
cgaaggctatgaaagcggattcatgatgatgaagaactgcatggatatcgatgtgtgtcagagagatcctctcctgtgccggggtggcgtttgc

SEQ ID NO: 212844 - DNA, 175 bp, Canis familiaris
gcttgggcccaacgggacccagccacagatcgccaactgcagcatttatgatttctttgtatggctccattattactctgttagggatactttattaggaccagggcgcccatacaaggccatagacttctcacaccaaggtcctgcctttgttacctggcaccggtaccatttg

SEQ ID NO: 212845 - DNA, 228 bp, Canis familiaris
taggacagtctaccgatgatgattctgttcctcttgtccattgtgtccgcctcctgtgtgcgtcatttttgctgactggggagaaaaatgttttggttccagacagggacgtgcgggtcagtgtgaaggcactggcactcagctgtgttggagctgctgtggcccttcatcctgaatctttcttcagcaaactttataaagtacctcttgacaccatggaataccctg

SEQ ID NO: 212846 - DNA, 324 bp, Canis familiaris; identical to SEQ ID NO: 2739

SEQ ID NO: 212847 - DNA, 170 bp, Canis familiaris
tctctctcggggctccctgggggggttccatcaagcccatgctggtcttggcctcaggtgacaaccagggcatcccgatcatgtccagcatcaagctgagagaggaacagcgtataacgacgacctccccctggatgtttccttccagagaggcatggcccgaagaccat

SEQ ID NO: 212848 - DNA, 600 bp, Canis familiaris
ctgggccaccctctgtgtgtcgtggagggctacactgtctccttgtgcgggatcacggggctctggtccctggccatcatttcctgggagaggtggctggtagtctgcaagccctttggcaacgtgagatttgacgccaagctagccatcgcgggcattgccttctcctggatctgggctgcggtgtggacggccccgccgatctttggctggggcaggtactggccccatggcctgaagacttcgtgtggcccggacgtgttcagtggcagctcgtaccctggggtgcagtcctacatgatcgtcctcatgaccacgtgctgcatcaacccactcagcgtcatcatactgtgctacctccaagtgtggctggccatccgagcggtggcaaagcagcagaaagaatctgagtccacccagaaggccgagaaggaggtgacccgcatggtggtagtcatggtcctcgcttactgcctctgctgggggccctacaccttctttgcgtgcttcgccgctgcccaccctggctacgccttccaccctctggtggccgccctgccagcctactttgccaaaagtgccactatctacaaccccatt

SEQ ID NO: 212849 - DNA, 600 bp, Canis familiaris
atgtgttcatattcacaatgatggttcatacaaaactttggaatatctaccccacatcatcagacactatggcaaaaggggacctagagcatccactcgtcaacctgatgacctaccctcaatggagcaaagaattcaatcagaagaacaagaaagtgtagacagccacccaacatcaagttctttgtcttgtattcacgaaaactaactttacacttaagtaaaatgctcagcaatttctacatttctcggacctctcagcagccagagtgtctaccaaaatataagtgcaagaggctacatgggattacagacagctagtgtatgaagggataatgtcaggtgctcatcttgcctttcctacttgctcttttgtgatacctagaacaatgatatgaagggtggagctacagccacctttctggaccaagaagattgggaagactagaaccatggaaccattgccaacccccaggtatttctggacttttacttcatgttgaaagtgaatacacttcagtcattgtacacacttacatctgtgtgcttcatgttctgttattaagagatggatgtagctcataactattacagaagatc

SEQ ID NO: 212850 - DNA, 600 bp, Canis familiaris
caccactcagctgcagagtccttcatgaagtacatgcagagcgagtaccgctcccgagggggctgccctgccgactggatttggctggtccccccaatttctgggagcatcactcctgtgttccaccaggagatgttaaattatgtcctgtcccctttctactactaccaggtggaggcctggaaaacccacgtgtggcaggatgagaagcggagaccccagaggagaaagattcaacttaaagtcttggttaaagctgtgctttttgcctccatgctgatgcgcaagaccatggcatcccgagtcagagtcacaatcctctttgcgacagagacgggaaagtcagaaacgctagcccgggacctaggggccttgttcagctgcgccttccaccccaaggttctctgcatggacgagtacaagctgagccacctggaggaggagcagctactgttggtggtgaccagcacgtttgggaacggagactcccctggcaatggagagaaactaaaaaaatctctcttcatgctgaaagagcttaccaacaagttcaggtatgccgtgtttggcctcggctccagcatgtaccctcagttctgt

SEQ ID NO: 212851 - DNA, 600 bp, Canis familiaris
ggaggggaagaagaggcagagacatcagcgcggcagcccctgatagacagtgaaaccccagagtcgaagccagactccagctcaaacctctcccttcaggaaaggtggactgtgttcaagggcttgctatggtacattgtccccttggtcctagtttactttgcggagtatttcatcaatcaggggctgttcgagctcctgttcttccggaacacatccctgaatcatgctcagcagtatcgctggtaccagatgctctaccaggctggcgtctttgtttcccgttcttctctccattgctgtcgcatccgtttcacatgggtcctggccctgctgcagtgcctcaacctggccttcctgctggtggacgtgtggttcagcttcctgcccagcatctacctcgtcttcctgatcattctgtatgaggggctcctcggaggtgctgcctatgtgaacaccttccacaacattgccctggagacaagtgaccagcaccgggaatttgccatggcagctgcctgtatctccgacactttgggaatctccctgtcagggctcctggccctgcctctgcacgacttcctttgtcacctgtcttga

SEQ ID NO: 212852 - DNA, 600 bp, Canis familiaris
gtggtctccgtggttctggctgtccctgaggccgtgggttttgatatgataaccattgactacaaaggacgttacctgcgaatctgcttgcttcatcctacccagaaaacagccttcatgcagttttacaagacagctaaagattggtggctatttagtttctatttctgcttgccattggccatcactgcctttttttataccctgatgacctgtgaaatgttgagaaagaagagtggcatgcagattgctttaaatgaccacttaaagcagagacgggaagttgccaaaacagtcttttgcctggtccttgtctttgccctgtgctggcttccccttcacctcagcaggattttgaagctcactatttatgatcagaatgatcccaatagatgtgaacttttgagctttttgttggtgttggattatatcggcatcaatatggcctccctgaattcctgcattaatcctatagctctgtatttggtgagcaaaagattcaaaaactgctttaagtcatgcttatgctgctggtgccagtcatttgaagaaaaacagtccttagaggaaaagcagtcatgcttaaagttcaaagctaat

SEQ ID NO: 212853 - DNA, 139 bp, Canis familiaris
tctcattgtccagcacacgtctttcaaggagatgaagaacaactccatggctaactacaccaccttatctcctgacatcatggaccacagcatttctgccttcatgaggaaaggcatctcgggggactggaagaccacc

SEQ ID NO: 212854 - DNA, 94 bp, Canis familiaris
gttcatggtagaaccaattcagggtgaggcgggcgtcgtcgttccggatcccggctacctgatgggtgtgcgagagctctgcacccagcaccag

SEQ ID NO: 212855 - DNA, 600 bp, Canis familiaris
aaatgtttattccgcctattaatgaatatactgttaccaagttactatcctccgtggtttctcattatcctctcctgcatttttaagggggagggggggaacgatggagaaggaaacttttcaaatgcccagagatgaagatgatacattttatgacttctgtctgaattccacttactcttgatgtctacaatcctcagtttaatatacaaaatgtatcttcattcttaaatctctatcagtcaggacatagagaatcacatcaattttatctcatttctattttcatatgtatgtcaaaataaaatttatctctggaattctaagctcctatgatattaactctattgctttttacagaaaaggactttgtaatttccacaacagctttccttaagacatgtgaaaacatttctaatttttgcctaccactgagatactgtaaccacttctcaatatctttatattcataaaatgtatttcctttggtatcacatgaaagtcacttggtgcaggtgttttatacacatatttatgcatttttactcaaatacctatcaaattacattctcacacttgaaatgggatattcatgagtgt

SEQ ID NO: 212856 - DNA, 1400 bp, Canis familiaris
ttcccggggacacccagggacccagggaatcatccccttctttcagccacagccatggcatgagtagacccctggcccatgccctgggatccactccccactcctaccttcggctctcctctactccacctgctgggtcaccactggccccactcagaggacagcttccctgcctcagcagctggcaccttgagtggtgggattcaaagagccccgagaccccagatggcaatccttagagacatttactcctccccgaagctgggccattctttccctctgcactcttcctaggacccagtctcttattcagaatagtttgggttgaggcccagagttggggggtccttttgtccctcatctgcaggtccaatcctgtggtcatcctctaaagtcacttagatcaccccagagggcctgaggcaaaagagtctataaagtcacaatgtcatgattgatttaatattatggagtgtctgttccttgctgggtactaggacgagaagagtggcaacacaaacatggctcgtgtcatattgtttagcagagaaaaatatggagcaaaataagtgccactctctggagaggaccatccaggtggtgtggagcctggggcgaggtccctgtgaattgctgcaggccagtgggccatggggtggaactaggcagacagaggcccaagaggaagatggaatgaagacttaaagcacccagtgagctcagctaaggactctgttctgcactggttgcaaggggaagcctaggagggggtgaagcagccaagggacagacgggatttgaccagcgggagggaggccagatcctgctaaggagggcgctggttcctgggccttgttagcaagcagattatagtcttacagaacctcagaagtgatgtgggagcagaaggcaagctaaggacaaagcactagctgacaccccaccactctcaggtgggatgtgtgtgacattcctcaggcactcctggctgccctaaagctaagggatcgaaaaaccaattgttaatttatagagtttacagtcctgcaagacaaaatgtcttagtgatttaccaggggaaaaataacccttctggaagttaggttattgataacctaacttccagaaggaaactcccaactgtcttactgttaatgctttcctagagggaaaaaccatctgaacttgatgatggcaaggcgtctagtatcttgtaggccctctttagcatacaaaaattcttttgaaaacctccctttttccttacccccagctcccaagtatataatctgtcacctttcacgaccccctgaagttgggcacctggcagctctttctgcctacgggtcctgtccccgtgtttgaataaaaccattttgcaccaaaaaaaaaaaaaaaaa

SEQ ID NO: 212857 - DNA, 600 bp, Canis familiaris
cctttgcagataaagtcatgggaatacttacaggaaaaatatacaaagatcctagaaattacagtgacaaaagcatgccgtggtaataggagctatcaaatatagttgtacagtttatcgtataactataaaatcacaagactgattgacttttaacataataaaatctatgtagtcaaatgagtggtaatgttttaaggtaatgatcatgggactctcaaggatgctacagaggcacttttgaagtctcttttgtagctattttcaaaaggataggagtttcatagtttaatcattcatttactttgggccccaatagtattccagttcagacatcctttatatttaccagtcttggcaacttggaaaagttaaacttatcttcatcgaatgaagatttgtcatctatgtagatgttcaaaggaatgtttattcaggttctgataataaatctgagaatttgagcactttcacactttttaagatgtgtgaaattatagtgaaccacgtatatcatagacatcttctgtatatgcctctcatwttgggataatgagatttttaaacaacagtgactcataacattgdaataggacacat

SEQ ID NO: 212858 - DNA, 600 bp, Canis familiaris
gacaccctatggataccggtctttctcaaacatcatcagcaccctcaatcccactgctaaacgacacttggtcctcgcctgtcactacgactccaagtattttcacccttgggacaacagggtgtttgtgggagccactgattcagccgtgccatgtgcaatgttgttggaacttgcccgtgccttagacaagcaactcctttccttggagaaaattccagactccaagccagatctctcactccagctaattttctttgatggggaagaggctcttcttcattggtctcttcgtgattctctgtatggatctcggcacttagctcccaagatggcatcaaccccacacccacctggagcgaaagacaccaaccaactgcacggcatggatttattggtcttgttggatttaattggagcgcccaacccaacatttcccaattttttcccaaaatctgccagatggtttaatagacttgaagcgattgaacaagaactccacaaattaggtttactcaaggattactctttggagaggtgctatttccagaatcatagttatggaggggtgattcaggatgaccatattccatttttaag

SEQ ID NO: 212859 - DNA, 600 bp, Canis familiaris
gatgtggtgttcctgctgcacaccactcaggacaacgctcatcgtgcagaggctgtaaagcgagccctggagcgtctggtgtctgcacttgggcctcttgggccacaggcagtccaggttggcctcctatcctacagtcatcggccctccccactgttcccgctgaatagctcctacaatcctgatgtcatcctgcagaagatccacagcatcccctatgtggacccaagtgggaacaacctgggcactgcagtggttactgctcacagacacctattagcaccggatgctcctgggcgccgccagcacataccagggataatggttttgctagtagatgagtccttgagaggtgacatcttcaaccctatccgtgaggcccaggctgctgggctcaaagtgatgatattgggccaggccggagctgacccagaacagttgcgtcgcttggtgccaggcatggatcctgtccagactttctttgctgtggatgatggatcaagcttggaccgggcagtcagtggcttggcaacatccctgtgtcagattggctccaccattcagccacagccagagccatgcacagtgcattgtccaaag

SEQ ID NO: 212860 - DNA, 267 bp, Canis familiaris; identical to SEQ ID NO: 2753

SEQ ID NO: 212861 - DNA, 600 bp, Canis familiaris
gtctacacttgccatgtggagcacgccagcctccagagccccatcacagtgcagtggcgggcacagtctgaatctgcccagagcaagatgctgagtggcattggtggcttcgtgctggggctgatcttccttgggcttggccttatcatccgtcacaggagccagaaaggatctcgggggtctccaccggcagggctcctgcactgatgcctgaggataccggggattccatcctttgtagtgtccgtctgtccctgcccagaattcccagctgcctgacagactgtcccccacatagatcagagtcctacatgactctgaggactcttgaggatctgggtgtgattctgcttcctgcattgacctgtgtgctccctgctacaggatctactcaggccccaagggattttcctgtttccattcttccttcacagattgtgcaagagaagcacattgaagccatttacctgaagatagagattttatcataattaaatgtgattatgagttctctgtaccctgagtcttcttaactgggtggaggcaggaaaccagtgcagaatgaaagggtcatattgctccttgaagggagaccggagg

SEQ ID NO: 212862 - DNA, 600 bp, Canis familiaris
tgtgtgtacacatttgaaagtgatgtctggtcctatgggatttttctgtgggagctcttctctttaggaagcagcccctaccctgggatgccagtcgattcaaagttctacaagatgatcaaggaagggttccggatgctcagccctgagcatgcacctgctgaaatgtatgacatcatgaagacgtgctgggatgctgatcccctgaaaaggccgacgttcaagcagatcgtgcagctaattgagaagcagatttcagatagcaccaatcatatttattccaacctcgcgaactgcagccccaacccagagcgccccgtggtggaccattccgtgcggatcaattccgtgggcagcagcgcgtcttccacccagcctctgctggtacacgaagatgtgtgaagcaggaggagtgccgggggtctccccaacaagagcgatccctgttcttttggttcctatactggttattctgtcctccttcggcttgcatcctattccagggtagcggacacccctctgtccctccctctttacgagcacaccctaattagtggccagtgacttttgtcatcagccaccatcctattgcaaaggttc

SEQ ID NO: 212863 - DNA, 126 bp, Canis familiaris
ttctggctctggatcaactctacagatcccgctggacagctccagtggctagtgggggagcttcaggctgctgaggatcgaggagacaaggtacatataattggccacattcccccagggcactgc

SEQ ID NO: 212864 - DNA, 1400 bp, Canis familiaris
tgtatttttcctatgctggctgtttccggtttggtgcctacttggtggcaaatgagttcatgaactttcaggatgttcttttggtattctcagctattgtctttggtgccatggcagtggggcaggtcagttcatttgctcctgactatgccaaagccaaagtatcagcagcccacgtcatcatgatcattgaaaaaagccctctgattgacagctacagccctcacggcctcaagccaaatacgttggaaggaaatgtgacatttaatgaggtcgtgttcaactatcccactcgaccagacatccccgtgctccaggggctgagcctcgaggtgaagaagggccagacgctggccctcgtaggtagcagtggctgtgggaagagcacagttgttcagctcctagagcgcttctatgaccccttggctggttcagtgctaattgatggcaaagagataaagcacctgaatgtccagtggctccgagcacacctgggcatcgtgtctcaggagcccatcctgtttgactgcagcattgccgagaacattgcctatggagacaacagccgggtcgtatcacatgaagagattatgcaggcagccaaggaggccaacatacaccacttcatcgagacactccctgagaaatacaacaccagagtaggagacaaaggaacccagctctctggtggccagaaacagcgcattgccatagctcgcgctcttgttagacagcctcatattttgcttttggatgaagctacatcagctctggatacagaaagtgaaaaggttgtccaagaagccctggacaaagccagagaaggccgcacctgcattgtgatcgcccaccgcttgtccaccatccagaatgcagatttaatagtggtgtttcagaatggcaaagtcaaggagcatggcacacatcaacagctgctggctcagaaaggcatctatttttccatgatcagtgtccaggctggagcaaagcgctagtgaactgtggccatatgagctgttaaatattttttaatatttgtgttaaaacatggcatttaatcaaagttaaaaggtgagcacttactggaaaaactatgtagaactacctgtttaacatttcttgctgcaactgaagatcattccaccaagttcagagtcttcagattttataattaaaggaaccaaaagaaacattatctgatggaataaaatattggtgttaattgcattataaaattatagagtaattcaaagtagattttgttaataaattgtataatttttgtttatattttatttgtaacttactgctttgctgaaagattatagaagtggtaaaaagtactgaatgtttgaataaagtgctagctataataaaactaaacttttatatgaaaaaaa

SEQ ID NO: 212865 - DNA, 1400 bp, Canis familiaris
agtcagctttgtgcagacaaatgccaagcctgagaagacaaagatggattgctataaagatgtgaaaggaaccatctatgaatatgaagccctcactctcaatggaaatgaacgcattcagttcaagcagtatccgcgcaagcatgttctttttgtcaatgtggccacctattgtggtctgacagctcagtatcctgaactgaattcacttcaggaggagctgaagccccttggcctggttgtattgggctttccctgcaaccaatttgggaagcagggaccaggagagaactcagagattcttccgggcctgaagtacgtccggccaggcagaggctatgtccctaacttccagctctttgagaaaggggatgtgaatggtgaaaaagaacagaaagtcttcaccttcttgaagctctcctgccctcacccctcagaggttctaggctccttcagacacatctcctgggatcctgtaaaggtccacgatatccgctggaactttgagaagttcctggtggggcctgatggggtccctgtcctgcgctggttccaccggactcccatcagcactgtcaaggaagacatcctggtctacctgaaacagctcaaaatgaaataggaaggcaggagcaaccctgcttctcatcagaagacggttttaaaaaaattccagatttcacgacattcttctaaatggcctgcccttgaccaaagcatgctgtaccgccagagttcccactctctaccaagcagttatatattcagaagactactgctatttctccttgcaagtccgtatgtggaagaagaacaaagaatggaacctctaaatccttagacctctaatataaataaatttaatcggtcctgtccatcaaagaaaatctagcgttccatgaggatggttcagtctgccacaacatcctgaaaaagaacgttccagacagaatgttcccccttctctttccactcaaaagtgtagaaataacagtgggatggtagccatacagccgagtttccaccttataacacctgccctccaccgtgacaaacacgtattgtcagtttccaagtcttttgagaccagtggttcatccatgaaacttaccctcccatacacacagtgtcctgtcattctggcttatgagctctaaggtggagtgagagcaggagactgccttgccaaggatagaaggacatctccatggtagtggacccggagcctctctatcatttagatcctacagaaacttccctgctgtctgacttgtagtgcactcaggtcatgacacctggacaatgcatcctttgaaggatgggctttctcttgtccatcctagattcttcagcttcagaaccagctctgcattgtctccaataaaatgttttctacagca

SEQ ID NO: 212866 - DNA, 156 bp, Canis familiaris
ggactgcttatggccctggttagctggagcatggattatgtcagtgccaaaagccttcaggcctacaagtggagctactaccagatgcagcccaacctgcctctgcagtacctggtctgggtcaccttcccgctaactctcatccttttcagcgcc

SEQ ID NO: 212867 - DNA, 600 bp, Canis familiaris
gccaatgacacagaagaagtaatcatgaagcccagatcagtagcatacaacttccataacaatgaaaaatacaactatataaggatcatcaaatcccaattcatcctgaatgacaacctcaatcaaagtatagttcgacaaacaggaggaaattacctcatgactgctgcattacagaatttggatgatgcagtgaagtttgacatgggagcttacacatcagaagattctaaacttcctgtgactctaagaatatcaaaaactcgactctttgtgagtgcccaaaatgaagatgaacctgtattgctaaaggagatgcctgagacacccaaaactatcagagatgagacaaaccttcttttcttttgggagcgtcatggcagtaagcactacttcaaatcagttgcccagcccaagttgttcattgccacacaggaacgaaaactggtgcacatggcaagagggcaaccctctatcactgactttcggttactggaaacccagccttgactctggagtctataacttgtgatgtgttgacagtccacgtgtactatgtacatggaggagtccaatcctttactcatagtcacttgctga

SEQ ID NO: 212868 - DNA, 600 bp, Canis familiaris
tggtcgcagacaccctcatgaggctccaggccatcgaggagacctgtcagcgccgcaatgacattggccgtgccctggatgccaccgagattctgggcttcttccacagctgccttaatcccctcatctatgccttcattggccagaagtttcgccatggactcctcaagatcatggccttccatgggctcatcagcaaggagtacctgcccaaggacagcaggccttcctttgttggctcttcttcagcgaacacttctactactttctaagcaccccctgccccggttgcagtccctcagggctctccctcgccatcagcatcccgttccaaacctcatgtccactggctgttcacagtctctgtgtcaaggcagctcccagctgtggttccaggggagttgctggggccacgtccttttcaggcccattgtatggtttagggagcctgccctgctgccccaccccttactatagctacagtgtcagctgctagagctcactgagcccacagcactctgttctctgaggcagctaaagatgtttaaaagacatccttttaaatgaaaaaaaaaaaaaaaaaaaaaaaaaaaaaaaaaa

SEQ ID NO: 212869 - DNA, 378 bp, Canis familiaris; identical to SEQ ID NO: 2762

SEQ ID NO: 212870 - DNA, 280 bp, Canis familiaris; identical to SEQ ID NO: 2763

SEQ ID NO: 212871 - DNA, 600 bp, Canis familiaris
tcaacttaactcttcaaccattcaaaaagagtgggcctcaggtgaaactttccagcagccataaatggagctattcattcatcagaaaacacaggagaaggtacagcaagaagacggcgtgtgtcttacctgctccagcaagacctcctcaagagaaccactcaagaatgcttccagaaaactttggttctgtaagaagtcagcattcttcatccagtaagttcataccgggggtccccacctgctttgaggtgaaacctgaagaaaactcggatgttcatgacatgagagtaaaccgttctatcatgagaatcaaaaagagatcccgaagtgttttctatagactaaccatactgatactagtgtttgccgttagctggatgccactacaccttttccatgtggtaactgattttaatgacaacctcatttcaaacaggcatttcaaattggtgtattgcatttgtcatttgttaggcatgatgtcctgttgtcttaatcctattctgtatggttttctcaataatgggatcaaagctgatttaatttcccttatacagtgtcttcatatgtcataattcttcatgtttaccaaggaga

SEQ ID NO: 212872 - DNA, 85 bp, Canis familiaris
gctggaacgcacagaagaacgggctgagctctcagaaagcaaatgtgccgagcttgaagaagaattgaaaactgtgacgaacaac

SEQ ID NO: 212873 - DNA, 600 bp, Canis familiaris
agggccagcagcacctttcaggccttggacccccagctggcagtcccctaccccagcgcctaccaagtcccacatcagcgcctcagcagcctgtgtcccaggcccagccactgagccaggctcaaggccgccaatcccggccggtggcaggaggacccggggcacctccagcagcccgcccacctgcctccccatctccccagcgccaagcgggccccccgcaggctactcgtcagacatccgtctctggtcaggctccgccgaaggcctccggagccccaccgagtggtcagcagcgccagggcccaccccagaaacccccaggccctgccggccccacacgccaggccagccaggcgggtcccatgccccgtactgggccacccaccacgcagcagccacggcccagtggcccaggccctgccggacgacccgccaagccacagctggcccagaaacccagccaggatgtgccgtcacctgccactgccgggggacccccgcacccccagctcaacaaatcccagtctctgaccaatgccttcaaccttccagagccagccccgcccaggcccagccttagccaggacgaggtgaaag

SEQ ID NO: 212874 - DNA, 218 bp, Canis familiaris; identical to SEQ ID NO: 2767

SEQ ID NO: 212875 - DNA, 1400 bp, Canis familiaris
gtatgatgataaagattttttaaccttgttagagtattttcatgaaaaccttctaatttcaagcacctcctggatacagctctacaatgctttccctcttttaatacattaccttccaggaagtcatcatgtgttatttaaaaacattgctaaccaatttaagtttatttcggaaaaaataaaagaacacgaagaatctctaaactttagtaaccctcgggactttattgactacttcctgatcaaaatagaaaaggaaaaacacaacaaacagtctgaatttaccatggacaacttgatcattaccatatgggatgtgtttagtgcgggaacagagacaacgagcaccaccctgagatacggactattggtgctattaaagcacccagatgtcacagctaaagtccaggaagagattcatcgtgtagttggcagacatcggagcccctgcatgcaagataggagctgcatgccctacacagatgctgtggtacatgagatccagagatacattgatcttgtccccaacaatctgccccattcagtgactcaggacatcaagtttagagaataccttattcccaagggcacaaccatattaacatctctgacttctgtcctgcatgatgagaaaggattccccaacccagatcagtttgatcctggccacttcctggatgaaaatggcagctttaagaagagtgactacttcatggccttctcagcagggaagagagtttgtgttggagaaggcctggcccgcatggagctgtttttgctactgaccaatattttacagcatttcaccttgaaacctctggttgatccaaaggacattgacaccaccccaattgccaatgggttgggtgctacaccaccttcctataagctctgttttgttccagtctgaagaaaggccaggccgccagattgcaaagccacactgacctcacctgaacaagccagatgcttttctgtcttatgtgtcagccaccatccacctctcctttcacatcaggaaggacattcctgaccctttcttttcattgtctttatccttaagattcagttcaaatttccctgtatgaaacaaaattcttttttgtaatccagtcctaagatttcatgctgtatctcatatgcagtgtataccaatggtgtaaactttattgtcatattttcttccattaaaaattaaaaattgggacgcctgggtggctcagcagtttagagcctgccttcggccccagggcctgatcctggagtcctggaattaagtcccatatcgggctccctgcatggagcctgcttctccctctgcctgtatctctgcctctctctgtgtgtgtgtctctcatgaataaataaaatctttaaaaacaaaaaaaaaaaaaaaaaaa

SEQ ID NO: 212876 - DNA, 176 bp, Canis familiaris; identical to SEQ ID NO: 2769

SEQ ID NO: 212877 - DNA, 157 bp, Canis familiaris; identical to SEQ ID NO: 2770

SEQ ID NO: 212878 - DNA, 377 bp, Canis familiaris; identical to SEQ ID NO: 2771

SEQ ID NO: 212879 - DNA, 600 bp, Canis familiaris
catgcttcctgggaaaacaaatgtcggtgcaaaagtgtatccccagagaacagaaaaggaaaagttaccactaaacctgaggaacagaagggagaaaaccccacagaaatgcagagccaaacgccgcccatggacgaagttgaccttgtaggtcactgcagggagcctcctccctgggaacatgaaaactccaagagaatttaccactttgtagtggggcagacacttcactaccagtgcatgcagggattcacagccctccacagaggtcctgccaagagcatctgcaaaaccatctttgggaagaccagatggacgcagcccccgctcaagtgcataagtgaaagtcagtttccagatgacgaagagcttcaagcaagcactgatgctcctgctgggagggacacttcgtctcccttcataacgacaagtactccagatttccacaaacacacagaagtggctacaaccatggagtcattcatattcacgaccgagtaccagatagcagtggcgagctgcgtcctcctgctgatcagcatcgtcctgctgagtgggctcacctggcagcggagaaggaggaagagtagaacaatctag

SEQ ID NO: 212880 - DNA, 600 bp, Canis familiaris
gagaaaacttgaaatctgagtttaaaaagattttaccttttgattgctgcagaaatgttctatgcactctttgcaagagcacacaacaaatatcagataccaatttttgcaagttagatctatttaaccttattaaatttttttatctttttctgtacagaaatatcaaattacatggaatattcaaagtttgaaaattataattgcctattaagctgtgaatagaagtatgatttgaataacattttcatgtatctgagatttttatatttatacaaaagattactaaagaaaggattgctaaatgttatttgttcaactacataaaatgataaggttacgttctgggtctaatttgtgagaaaataaattcatatttaaattcaatgtagggaaatacatctatttctccatctacattttaagatcttttagtgctttgaaactgctgaaagcaatccagttgctcctgtgctagatagtagccagattttgcactaatggagttttgtctttaatctcttaattgcatttcttttctgtaaatcagataaatccttaatatttctttaaattaagcttctgtatgtggtaatttcc

SEQ ID NO: 212881 - DNA, 600 bp, Canis familiaris
ggaccagcaggccttcttagaggtaaaggatgtctgagcacttccattttttggagattcttgtgttgttatataagaaagaatttccaacatttgtggtttttaaaaattaaacctttttaacatactataatatgggaaaagtgggcttgtcacaaaagaattgcaaatttataacaattattgatttcattgttgctccaagcaatgtggtctagtccggagacccagaagaggaattatgccaaattctttttgtagtcctatcagtttacctctgtgacatgtgtgttacatggtgcatgtggggcccgattctgtgatcctttgggcccctccaggcctgctgctgccaccccagctcccccacgtcacccaccacctggagcttaggggtccaggtggagtcctgatggtttttcccctctgccctggtcctggtctggcagagctggggtgaggcctcttgctgaccccctgttccccttgagcttctgctcatatcacattctttttccttcctacctaaagagatgaatgccaagatgctggactttgagacgttcctgccaatcttgcagcacatttcccgcaacaagg

SEQ ID NO: 212882 - DNA, 1400 bp, Canis familiaris
acacggcgtatgataattttggcaatacgggccattttaccatcatttacaatcaaggctttgagattgtgttgaacgactacaagtggtttgccttttttaagtataaagaagagggtcacaaggtcaccagttactgcaacgagaccatgactggatgggtgcacgatgtgctgggccgcaactgggcttgtttcactggaaccaagatgggaactacctctgaaaaagcgaaggtgaacacaaaacacattgagaggctccaggaaaacaattctaataggctctacaaatacaactatgagtttgtgaaagcgatcaataccattcagaagtcttggactgcaaccagatacatagaatatgagactctcaccttgagagacatgatgacgagagttggtggccggaaaatcccaaggcctaaacccacaccactgactgctgaaatacatgaagagatttcacgtttgccaacatcatgggactggagaaatgttcgtggtaccaattttgttagtcctgttcgaaaccaagcatcttgtggaagctgctacgcatttgcgtctacagctatgttggaagcaagaatccgtatactaaccaacaatactcagactccaattttgagtcctcaggagattgtctcttgcagccagtatgctcaaggctgtgaaggtggcttcccgtacctcatcgcaggaaaatatgcccaagattttgggctggtggaagaggcctgcttcccctacgcaggctctgattctccatgcaaaccaaatgactgcttccgttactactcctctgagtactactatgtgggaggtttctatggggcctgcaatgaagccctgatgaagcttgagctggtccgtcacgggcccatggcagttgcttttgaagtctatgatgacttcttccactaccagaagggaatctattaccacactggcctgagagaccctttcaacccctttgaactgactaatcatgctgttttgctggtgggctatggtactgactcagcctctgggatggattactggattgtgaaaaacagctggggctctaggtggggtgaagatggttacttccggatccgcagaggaacggatgaatgtgcaattgaaagcatagcagtggcagccacaccaattcctaaattgtaggatatgggtcctggcatttcctgttgaccaccattagtcacgaaaggggatcaatttattcagaccgaaaacttttatagcagcaatttcagattacagatagattcctatgaagatttttgcctttaaaattaaaattgtctttgatttaaatatacctttccattaaccactggcctactttatagctatgtagtaataaaatgcaggattctgttcattaaaaaaaaa

SEQ ID NO: 212883 - DNA, 600 bp, Canis familiaris
ggaaatttgcgggccaagtacctggacgacagaaacacttttcgacacagtgtggtggtgccttatgagccacccgaggttggctctgactataccaccatccactacaactacatgtgtaacagttcctgcatgggaggcatgaaccggcggcccatcctcactatcatcaccctggaagactccagtggaaacgtgctgggacgcaacagctttgaggtacgcgtttgtgcctgtcccgggagagaccgccggactgaggaggagaatttccacaagaagggggagccttgtcctgagccaccccccgggagtaccaagcgagcactgcctcccagcaccagctcctctcccccgcaaaagaagaagccactagatggagaatatttcacccttcagatccgtgggcgtgaacgctatgagatgttcaggaatctgaatgaagccttggagctgaaggatgcccagagtggaaaggagccagggggaagcagggctcactccagccacctgaaggcaaagaaggggcaatctacctctcgccataaaaaactgatgttcaagagagaagggcttgactcagactgaggttaaggatcc

SEQ ID NO: 212884 - DNA, 600 bp, Canis familiaris
cccgaggtattgcccggctccgtaagcggcagcactccgtccaccagggctttggcctcaagggcgctgccacactcactatcctgctgggcattttctttctctgctggggccccttcttcttgcacctctcactcatggtcctctgccctcaacaccccatctgtggctgcgtctttcagaacttcaacctcttcctcaccctcatcatctgcaactccatcattgaccccttcatctacgccttccgcagccaggagctccgaaagactctccaagaggtagtgctatgttcctggtgaggctgcaggcttgaggccagggtgctggccagaggggggtggtgattgatacccatgtgactggggcagtcacttgcagaaaaggacagatgagctgatctgtggtgtggtggatgcatggaccctctggggccagagaaaggaataaacaaaaatctccaggagttgctgtggagaatggagcaggctgaggagatggtggggccacagacacgagagccaggtccgggactactggacaagcatctctggctgctcctggagagttccttctccacccagggaccaggcaaggcct

SEQ ID NO: 212885 - DNA, 361 bp, Canis familiaris; identical to SEQ ID NO: 2778

SEQ ID NO: 212886 - DNA, 247 bp, Canis familiaris; identical to SEQ ID NO: 2779

SEQ ID NO: 212887 - DNA, 231 bp, Canis familiaris; identical to SEQ ID NO: 2780

SEQ ID NO: 212888 - DNA, 349 bp, Canis familiaris; identical to SEQ ID NO: 2781

SEQ ID NO: 212889 - DNA, 135 bp, Canis familiaris; identical to SEQ ID NO: 2782

SEQ ID NO: 212890 - DNA, 600 bp, Canis familiaris
gggtcttctgcaatatctgggcggcggtggacgtcctgtgctgcaccgcgtccatcatgggactctgcatcatctccatcgaccgctacataggtgtgagctacccgctgcgctaccccaccatcgtcacccagaagaggggtctcatggctctgctctgtgtctgggcgctgtccctcgtcatctccatcgggcctctctttggctggaggcagccggcccccgaggacgagaccatctgtcagatcaccgaggagccgggctacgtgctcttctcggcgctgggctccttctacgtgccactgaccatcatcctggtcatgtactgccgggtctacgtggtggccaagagggagagcaggggcctcaagtctggcctcaagactgacaagtcggactcggagcaggtgacgctccgcatccatcggaagaacgccccagtaggaggcaccggggtgtccagcgccaagaacaagacgcacttctcggtgaggctcctcaagttctcccgggagaagaaagcggccaaaacgctgggcatcgtggtcggctgcttcgtcctctgctggctgccttttttcttagtgatgcccattgggt

SEQ ID NO: 212891 - DNA, 600 bp, Canis familiaris
gctgactgggcctggatcgtgccccccatctctggcagcctcacccctgttttccatcaggagatggtcaactatgtcctgtccccggccttccgctatcagacagacccgtggaaggggagtgcatccaagggtgccggcgtcaccaggaagaaaacctttaaggaagtggccaatgcggtgaagatctctgcctcactcatgggcactgtgatggcaaagcgagtgaaggcgacaatcctctatggctccgagactggccgggcccagagctatgcacagcagctggggagactcttccggaaggctttcgacccccgggtcctgtgcatggatgagtatgacgtggtgtcccttgagcatgagacgctggtgttggttggtgaccagcacattttgggaatggtgatcccccagagaatggagagagtttttgcggcagccctgatggagatgtcgggtccctacaacagctcccctcggccagaacagcacaagagttacaaaatccgcttcaacagtgtctcctgctcagacccactggtgtcctcctggaggcggaagagaaaggagtccagtaacacagacagtgctgggcac

SEQ ID NO: 212892 - DNA, 600 bp, Canis familiaris
aggtgttcgatgcccgtgactgcaccacagctcatgggatgttcaactacatctgcaaccacatcaagtatgccaccaacaaagggaacctccggtctgccatcaccatatttccccagaggactgacggcaagcacgatttccgagtctggaactctcagctcatccgctatgccggctacaagcagcccgacggttccatcctaagggacccagccaacgtggaattcacagagatttgcacacagcagggctggaaacccccaagaggccgcttcgatgtcctgccactcttgctccaggccaacggcaacgaccccgagctcttccagattcctccagagctggtgttggaagtacccattaggcaccccaagtttgagtggttcaaggatctgggcctgaagtggtacggcctccccgctgtgtccaacatgctgctggagatcggcggcctggagttcagcgcctgtcccttcagcggctggtacatgggcacagagattggcgtccgcgactactgtgacaactctcgatacaacatcctggaggaagtggccaagaagatgaacttggacatgaggaagacatcctccctgt

SEQ ID NO: 212893 - DNA, 127 bp, Canis familiaris
gaatcttagaaaatggagctgtacgctatacaacttttgaatatcccaacacgatcagttttgcttgtaacactgggttttatctaaatggaagtagctctgctaaatgcaccgaggaaggaaaatg

SEQ ID NO: 212894 - DNA, 805 bp, Canis familiaris; identical to SEQ ID NO: 2787

SEQ ID NO: 212895 - DNA, 495 bp, Canis familiaris
atggacaccaagacacagagcctgcccatcacccacacccagccccacagcaactcccggccccaaggccacacctgcagccagtgcacctgcagctcccactgccaaacctgcagccagagctgcagccagagccggagctccagccagagcccaactggccaccacagctcgtctggccatcagagccagagcccgcaccccaccctgccaccgaggcaccaaaaacacaccaggcactcccaccactgtccccctcggcccaccacccattcctgcagctatcccaagaacagaaagaacttcgaaggaaaggtgaacaagaggaaggtggtcaagaggagccagcaggtgtataaaacaaagaggcggaactcagggcggaaatagaactgagaaggcaccccatggcttgttcctgtgttggtttcacccaagtaagaagggccatcacgcgtggaaggctagaaggaagtccacctttgtgcaggaaca

SEQ ID NO: 212896 - DNA, 417 bp, Canis familiaris; identical to SEQ ID NO: 2789

SEQ ID NO: 212897 - DNA, 187 bp, Canis familiaris; identical to SEQ ID NO: 2790

SEQ ID NO: 212898 - DNA, 479 bp, Canis familiaris
catcctgagcgagtactacatcctcactgcggctcactgtctccagcaagccaagaaattcacggtgagggtaggtgaacgggacacagacaaggaggagggcaacgaggtggcacacgaggtggaaatgatcatcaagcacaacaagtttgtcagggagacatacgactttgacatcgcggtcatcaagctgaagacgcccatcaccttccgcatgaacgtggcgcccgcctgcctgccgcagaaggactgggccgagtccacactcatgacgcagaagacaggcattgtaagcggcttcgggaaaacccacgagaagggccgcccgtccaccaccctcaagatgatggaggtgccgtatgtggacaggaacacgtgcaagctgtccagcagtttcagcatcacccagaacatgttctgtgccggctatgactcgaagcccgaagacggctgtcagggggacagcgggggcccccatg

SEQ ID NO: 212899 - DNA, 600 bp, Canis familiaris
caattctcaataaaccatgaaactcttctattgttcctgttgagactatgactaacgtatacttgataagatgactgtattgtagcaaaattcatgcatctacatttttatccaggaagcatggtttgactcattctatataggaaatcatacaacagtgagtcatatcttaatatgtttctaaatctaaatgtttggcatggtataaacctgacatcaaaatatttcagtgaatttgcactgtttaatcatcttagttactgtacaaactcatctgaaatgtcacgaaaataaactatgaaacaaaaatttcaaaatggaatagtatttgataaatttccccaaataacaatttctagagcatagtattttttaatgagataaaagtggagaacttgtatttattttggcagatttttaaagtgtggttgcatttagatgttaaaatatttagtatagtacttggtatttagaggatattttttccttatagtatgatcttcaaaagagtagaaccaccttatttatttatttatttattttacagtgagtgttattacaggatagctattatttaaaaaaaaaaaaaaaaaaaaaaaa

SEQ ID NO: 212900 - DNA, 317 bp, Canis familiaris; identical to SEQ ID NO: 2793

SEQ ID NO: 212901 - DNA, 304 bp, Canis familiaris; identical to SEQ ID NO: 2794
  misc_feature (291)..(291): n is a, c, g, or t

SEQ ID NO: 212902 - DNA, 134 bp, Canis familiaris; identical to SEQ ID NO: 2795

SEQ ID NO: 212903 - DNA, 407 bp, Canis familiaris; identical to SEQ ID NO: 2796

SEQ ID NO: 212904 - DNA, 409 bp, Canis familiaris; identical to SEQ ID NO: 2797

SEQ ID NO: 212905 - DNA, 723 bp, Canis familiaris
atggcaccctttgcgcccctggcctcctgcatcctgctgttgctgtgggtgaccgcccccagcagggcctgtacctgtgccccaccccacccgcagacagccttgtgcaactcccaaatcgtcatcagggccaagttcgtggggaccgcagaagtcaaccagaccgacttaaaccggcgttatgagatcaagatgaccaagatgttcaagggtttcagcgccttggggaatgcctcggacatccgcttcgtcgacacccccgccctggaaagcgtctgcggatacttgcacaggtcccagaaccgcagcgaggagtttctggtcgccggaaacctgcgggacggacacttgcagatcaacacctgcagtttcgtggccccgtggagcagcctgagtaccgctcagcgccggggcttcaccaagacctatgctgctggctgtgaggggtgcacagtgtttacctgttcatccatcccctgcaaactgcagagtgacactcactgcttgtggacggaccacttcctcacaggctctgacaagggtttccagagccgccacctggcctgcctgccaagagagccagggatatgcacctggcagtccctgcggccccggatggcctaaatcctactccccgtggaagccaaagcctgcacagtgttcaccccacttcccactcccgtctttctttatccaaaacaatgaaataaagaactaccatcc

SEQ ID NO: 212906 - DNA, 273 bp, Canis familiaris; identical to SEQ ID NO: 2799

SEQ ID NO: 212907 - DNA, 223 bp, Canis familiaris; identical to SEQ ID NO: 2800

SEQ ID NO: 212908 - DNA, 297 bp, Canis familiaris; identical to SEQ ID NO: 2801

SEQ ID NO: 212909 - DNA, 252 bp, Canis familiaris; identical to SEQ ID NO: 2802

SEQ ID NO: 212910 - DNA, 381 bp, Canis familiaris; identical to SEQ ID NO: 2803

SEQ ID NO: 212911 - DNA, 381 bp, Canis familiaris; identical to SEQ ID NO: 2804

SEQ ID NO: 212912 - DNA, 408 bp, Canis familiaris; identical to SEQ ID NO: 2805

SEQ ID NO: 212913 - DNA, 408 bp, Canis familiaris; identical to SEQ ID NO: 2806

SEQ ID NO: 212914 - DNA, 462 bp, Canis familiaris; identical to SEQ ID NO: 2807

SEQ ID NO: 212915 - DNA, 438 bp, Canis familiaris; identical to SEQ ID NO: 2808

SEQ ID NO: 212916 - DNA, 48 bp, Canis familiaris
cgtctgtgtggtatacctcaagaggaatgactgtttatgccattttcc

SEQ ID NO: 212917 - DNA, 390 bp, Canis familiaris; identical to SEQ ID NO: 2810

SEQ ID NO: 212918 - DNA, 464 bp, Canis familiaris; identical to SEQ ID NO: 2811

SEQ ID NO: 212919 - DNA, 600 bp, Canis familiaris
gcgggcggggagaaggccaccatgcagaacctcaatgaccgcctggcctcctacctggacaaggtgcgcgccctggaggaggccaataccgagctggaggtgaagatccgcgactggtaccagaagcaggccccggggcctgcccgcgactacagccactactaccagactattgaggacctgaagaacaagatcctcacggccactgtggacaatgccaatatcctgctgcagatcgacaatgcccgcctggctgctgatgacttccgtaccaagtttgagacggagcaggctctgcgggtgagcgtggaggctgacaccaacggcctgcgcagggtgctggatgagctgaccctgtccagagctgacctggagatgcagattgagaacctcaaggaggagctggcttacctgcggaagaaccatgaggaggagatgaatgccctgcgaggccaggtgggtggtgagatcaacgtggagatggatgcagcccccggtgtggacctgagccgcatcctgtctgagatgcgtgaccagtacgagaaaatggcagagaagaaccgcaaggacgccgaggactggttcttcagcaaggtagag

SEQ ID NO: 212920 - DNA, 469 bp, Canis familiaris; identical to SEQ ID NO: 2813

SEQ ID NO: 212921 - DNA, 422 bp, Canis familiaris; identical to SEQ ID NO: 2814
  misc_feature (321)..(322): n is a, c, g, or t

SEQ ID NO: 212922 - DNA, 410 bp, Canis familiaris; identical to SEQ ID NO: 2815

SEQ ID NO: 212923 - DNA, 275 bp, Canis familiaris; identical to SEQ ID NO: 2816

SEQ ID NO: 212924 - DNA, 409 bp, Canis familiaris; identical to SEQ ID NO: 2817
  misc_feature (403)..(403): n is a, c, g, or t

SEQ ID NO: 212925 - DNA, 299 bp, Canis familiaris; identical to SEQ ID NO: 2818

SEQ ID NO: 212926 - DNA, 274 bp, Canis familiaris; identical to SEQ ID NO: 2819

SEQ ID NO: 212927 - DNA, 299 bp, Canis familiaris; identical to SEQ ID NO: 2820

SEQ ID NO: 212928 - DNA, 448 bp, Canis familiaris; identical to SEQ ID NO: 2821
  misc_feature (320)..(320): n is a, c, g, or t

SEQ ID NO: 212929 - DNA, 360 bp, Canis familiaris; identical to SEQ ID NO: 2822

SEQ ID NO: 212930 - DNA, 366 bp, Canis familiaris; identical to SEQ ID NO: 2823
  misc_feature (313)..(313): n is a, c, g, or t

SEQ ID NO: 212931 - DNA, 429 bp, Canis familiaris; identical to SEQ ID NO: 2824
  misc_feature (8)..(8): n is a, c, g, or t

SEQ ID NO: 212932 - DNA, 241 bp, Canis familiaris; identical to SEQ ID NO: 2825
  misc_feature (81)..(81): n is a, c, g, or t

SEQ ID NO: 212933 - DNA, 279 bp, Canis familiaris; identical to SEQ ID NO: 2826

SEQ ID NO: 212934 - DNA, 321 bp, Canis familiaris; identical to SEQ ID NO: 2827

SEQ ID NO: 212935 - DNA, 600 bp, Canis familiaris
attttgtgttcatgaaaacgttacagaaatgcaacaaaggggaggggtccttgtccttactgaactgtgaggaaattaaaagccaatttgaagcctttctcaaggagataatgctaaacaacgaaatgaagaaagaagaaaacattgcaatgcaaaaaggtgatcaggatcctcgaattgcagcccatgtcataagtgaggctagtagtaacccagcgtccgttctgcggtgggcgccaaaagggtactacaccataagcagcaacctggtgagcctcgagaatgggaaacagttggccgtgaaaagacaaggactctattacgtctatgcccaagtcaccttctgctccaatcgggcagcttcgagtcaagctccgttcgtcgccagcctatgcctccattccccgagtggaacggagagagtcttactccgcgccgcgagctcccgcggctcgtccaaaccttgcggccaacagtccatccacttgggaggagtatttgaattgcatccaggtgcttcggtgttcgtcaacgtgactgatccaagccaagtgagccacgggaccggcttcacgtcttttggcttactcaaactctgaa

SEQ ID NO: 212936 - DNA, 600 bp, Canis familiaris
tcttttggtgtaatgccaaaataccacagatcagcaactatacatttaagaggaaaataaattggaagggtggtgtgtgtgtgtgagtgtgtgtgtgtgtgtgtgtgtgtgtatgtatgtacgtgagtgtgatgtggaagtagaatgagaaataagttttaattattagtaggcctatcctttagatgggacagttgggaaagctgccctggagggttatgggagtgctgctttgtaaagagaactagggcatacctagcctacacacattaaatgagttttgtctcaggcttgtattcttctaggctatcaaatgaagtaataagcttataaataagacttatttttgttttttaaaaggcttaacaagttatggattgaaattttcaattaagggagaaggtcacggatatgaaattgagaaataaacaagatagacaaatgacttgggtagcgtagcatttactggtttgtcagttaggttttttaaaaaaaatatttatttatgtgagagagagagagagagagagagaaagtcagggacacaggcagagggagaggcaggctctgtgcaaggagctgcaaggatgtgggactcga

SEQ ID NO: 212937 - DNA, 256 bp, Canis familiaris
tctcatcatggcctcacttcccggggtcatggccattgggcctggtgagcctgcctccctgggccccacgttcaccaacacgggtgcctccaccctggtcattggcctggcctccactcaggcccagagcgtgccagtcatcaacagcatgggcagcagcctgaccaccctgcagccagtccagttctcccagccactgcacccttcctaccagcagccactcatgtctcccatgcagagccatgtggcccagagc

SEQ ID NO: 212938 - DNA, 233 bp, Canis familiaris
tcctctggctgaccattgagctagccatcgtgggctcggacatgcaggaggtcatcggcacggccatcgcgttcagcctgctgtcagccggccgaatcccactctggggtggcgtcctcatcaccatcgtggacaccttcttcttcctcttccttgacaactacgggttgcggaagctggaagcctttttcggaatccttattacaatcatggccttgaccttcggctatgag

SEQ ID NO: 212939 - DNA, 126 bp, Canis familiaris
tacaccgtcgccgtccgcaacacccgccttgtgggccaggaggtggcagctctcatcctgtggctggaggaatctgcccaattttctcgaagcaatgttcatctaattgggtatagcctgggcgca

SEQ ID NO: 212940 - DNA, 470 bp, Canis familiaris; identical to SEQ ID NO: 2833
  misc_feature (450)..(450): n is a, c, g, or t

SEQ ID NO: 212941 - DNA, 141 bp, Canis familiaris; identical to SEQ ID NO: 2834

SEQ ID NO: 212942 - DNA, 1400 bp, Canis familiaris
aacccaacctctggggatgggaggggagagggtggggggagggtgtctcgctttgggcggagggaaaggggtactggtggtgagctgcggggtggactggagtcttcccagagaggcccgacaaggaaacgccacagaccactgccccacgatgttgcccacgcccacccttcagggggtaaccaggccggttctccctgcttcccggaccttagcttatttatctgacatttccacgtggttagatcctcctctgaattgagcctccctttaagggaagttgatgcaccctatgataatctccttccctgccacccagacttagtctgaaatgtgaacctccctccctgctgtccagcctctccctcccagcaaaagtggctctgaatttctggtctcctaaggatcccccatcacaaccaccgtccaattcagcccccagtcctcctttctgattacagtgttaccccaagcctcccagcctggctcagccttccctcctggccttccttgctgggcctctctgattcaggcagcaggggggcgctgtgatgcccgtcctgctggagtgctttatactgtgaaccgggttggccggattgtggggtggggagtggggggcgggggagggaagcccagtgggacagaacccttgctgggggcggggagagaattgtgttccccacgcctcaaagcctttccttggtctcccctcctcccagccgcctccttcctcccctcaacagtgagttagttagactccaggggtgacagtatcaagagtgggggtgacagttatccacccgcgtggcctctgtcctcaggaccccgcacccccagccctggccttcttctctaaggcctgtccccctaccccggcctaggacgcccacttctccctcctcgtggcacccctacatcctttctagaaagagactaatgggaggttgccagggggcccagtatttttttccggagaagatttaaaggctgaggccttgtccccacccccaaccccccaaccccaatattttcggactggcaaactcaaaggggctggacttccacagtcccagcttcctagccccccaggcccccagccccagattcttggtttgggctccccatccctactctccccgtgcttcacctcatgggaattctaccgtgaggctgattggtattttttttttttaattttaacttcgggtgggccacgccgccttctgtgctgcatgggaaacattccacgtgccccgtccccgcgccccccgtccccgtggctatttatccctttcctggtttccgaaaggcacttatatctattatgtataaataaatatattatatatgggtgtgcgtgtgcgcgtgcgcgtgagtgtgtgtgagcgcttctgcag

SEQ ID NO: 212943 - DNA, 147 bp, Canis familiaris; identical to SEQ ID NO: 2836

SEQ ID NO: 212944 - DNA, 445 bp, Canis familiaris; identical to SEQ ID NO: 2837

SEQ ID NO: 212945 - DNA, 600 bp, Canis familiaris
aagggtatggcattcctggcctcgaagaattgtattcacagagacttggctgctagaaatatcctccttactcatggtcgaatcacaaagatttgtgattttggtctagccagagacatcaagaatgattctaattatgtggtcaaaggaaacgctcggctacctgtgaagtggatggcccctgagagcattttcaactgtgtgtacacatttgaaagtgatgtctggtcctatgggatttttctgtgggagctcttctctttaggaagcagcccctaccctgggatgccagtcgattcaaagttctacaagatgatcaaggaaggcttccggatgctcagccctgagcatgcacctgctgaaatgtatgacatcatgaagacgtgctgggatgctgatcccctgaaaaggccgacgtccaagcagatcgtgcagctaattgagaagcagatttcagatagcaccaatcatatttattccaacctcgcgaactgcagccccaacccagagcgccccgtggtggaccattccgtgcggatcaattccgtgggcagcagcgcgtcttccacccagcctctgctggtgcacgacgatgtctga

SEQ ID NO: 212946 - DNA, 276 bp, Canis familiaris; identical to SEQ ID NO: 2839

SEQ ID NO: 212947 - DNA, 122 bp, Canis familiaris
ccaagtgacaagccagtagctcatgttgtagcaaaccccgaagctgaggggcagctccagtggctgacccgacgtgccaatgccctcctggccaacggcgtggagctgacagacaaccaact

SEQ ID NO: 212948 - DNA, 548 bp, Canis familiaris; identical to SEQ ID NO: 2841

SEQ ID NO: 212949 - DNA, 363 bp, Canis familiaris; identical to SEQ ID NO: 2842

SEQ ID NO: 212950 - DNA, 118 bp, Canis familiaris; identical to SEQ ID NO: 2843

SEQ ID NO: 212951 - DNA, 181 bp, Canis familiaris
ggcactgtgggggtaccagagcactcataccgctcccgaaccaatttcaccagcaagtacaacatcaaggtcctctacttatccggcttcaccaccaaggacgaggggacatacacatgtgaactccggctctctggccagcctcccatcacctccagcaagaacgtcactgtgctcagag

SEQ ID NO: 212952 - DNA, 190 bp, Canis familiaris
gaagaagatcagagagtgatagaacttgtacagaaatacggtccgaaacgttggtctgttattgccaagcacttaaaggggagaattggaaaacaatgtagggagaggtggcataaccacttgaatccagaagttaagaaaacctcctggacagaagaggaagacagaatcatttaccaggcacacaagc

SEQ ID NO: 212953 - DNA, 130 bp, Canis familiaris
ggtggtagagtcaaagaagaaggctgtgcagaggctggaggagcagttaatgaagctcgaggttcaggccacagaccgagaagagaataaacaaattgctttgggaacctccaaactcaattatctggac

SEQ ID NO: 212954 - DNA, 196 bp, Canis familiaris; identical to SEQ ID NO: 2847

SEQ ID NO: 212955 - DNA, 131 bp, Canis familiaris
catggggtcaacaaacatgaggatgccgatatccgagggaagggctttgactggccgctgctggtgaaggacttcaacctgttgcgctggctgggcgccaatgccttccgtaccagccactatccctactc

SEQ ID NO: 212956 - DNA, 1400 bp, Canis familiaris
agccttggtcaaagaattgttcaggcctgggaagagacattcggaaaatacttgtctcattaatgacaaggacatcaaggcctagggggtgacctgaatgataaaggtctgagctagaacccagatttcctgtctcgggtgctcttttccatcagtagtccggctctgtgctattaactggtgtgtacaggtgtacacaccagtcaaaatgcttctggaaaaagagtatgtccaatgtcaggtcaacttcagagacttcatctgatgcaacactagaaggttttgtgttgctgtcaaaagcaatctgatgctaatgtgtggtagtatgatggtatatataccaatatgagaatgatggaaaaattactggggtttactcagtatctcatctttcattgtgttctcctctgttgctttcccacttctccatcaggttctggagaaagtagatctatccaaaactaatatctgctgacatgtaagatgaatgacttatatacctcaaagcgatagtcacgttggagagggataggttggtttagagagtcacatcctactggttcatattggactgataatctccttaatggctttatgctagtttaaactcatttataaaacatgagaaagttctcatttaaaatgagataggttttaattgtatattactaaacagatattactaaacagtagctgtccttagaatttgattgaggtaatgaaaatagcattccatagggtttccctagattcctcaagttgctcttcctccttggtatttctgatccttctgacatcagcagagaattaaaaataaagaagtggccaactgccgttcctgtgtcacttactcatgattcctttctctgaagttgtcttccataactcagtggacctggaggtagacctgactggaggaatcagacattctcatttgaaaatttgacgttggacagcaagttggccaagtttctcacatgtagctgggtttacaatgtttaattttggcagctatcaagggaccagattatgctatatagtctaaggagcagaagtacagttttaaatggttgccctcagaacaaaatcactgaaagaaataaaagttggagactgacctgaactcaaagcaaagaaacaaaaaaaatgggaactgctgcatttaattaaaattaataatccttagacatgctcaaaaggagacctcaagaagtaatcacaaaataggacacatctaggagacagcttatttatacttaaaataaattatattacattacttattacatttgataaatgtgttggtactattttccaaagaattatacttttattgatatttttgtgatatgaataaaattatttttaaaaccaaaaaaaaaaaaaaaaaaaaaaaaaaa

SEQ ID NO: 212957 - DNA, 600 bp, Canis familiaris
tacattgtgttttatgtagaactcccaattactggactaatggcttttatctatgcttaattctaagatagtgcctcattccatcttgtatatttgtgactacctctgcagtctgggtgggagttttgtatgttatggctttatagtgttgctttaatattttgagacataaagagatgtgtactataataatgtaattactatgccctgagaaaattctacccactgctgaggagctcttgctcctctgtgagggtcagtacgaaaatggtggcttggtgtgctgacaacaatgagcagaccaactcaaaatttggaagattaggaatgatggagatagaaccagctctgagtcctggagccacttctatctgggctgctgctaatctgaggaagatccacctgcctaacaagctatggataagccttagcagggagctctttgtgaagcaggaaagcactatgcactgtgaaccctacttctcttcttgaaaaaaatggctgagatgatggctcagggcaactgttcaagagccaactgagagatcacaatacttaaaagagaaaaaagaaaaaagaaaaaaaaaaaaaaaaaaaaaa

SEQ ID NO: 212958 - DNA, 600 bp, Canis familiaris
ttttatctatgcttaattctaagatagtgcctcattccatcttgtatatttgtgactacctctgcagtctgggtgggagttttgtatgttatggctttatagtgttgctttaatattttgagacataaagagatgtgtactataataatgtaattactatgccctgagaaaattctacccactgctgaggagctcttgctcctctgtgagggtcagtacgaaaatggtggcttggtgtgctgacaacaatgagcagaccaactcaaaatttggaagattaggaatgatggagatagaaccagctctgagtcctggagccacttctatctgggctgctgctaatctgaggaagatccacctgcctaacaagctatggataagccttagcagggagctctttgtgaagcaggaaagcactatgcactgtgaaccctacttctcttcttgaaaaaaatggctgagatgatggctcagggcaactgttcaagagccaactgagagatcacaatacttaaaagagaaaaaagaaaaaagaaaaaaaaaaaaaaaaaaaaaaaaaaaaaaaaaaaaaaaaaaaaaaaaaaaaaaaaaaaaaaaaaa

SEQ ID NO: 212959 - DNA, 1400 bp, Canis familiaris
tggtggggacataagtagctctctggtagccttggtcaaagaattgttcaggcctgggaagagacattcggaaaatacttgtctcattaatgacaaggacatcaaggcctagggggtgacctgaatgataaaggtctgagctagaacccagatttcctgtctcgggtgctcttttccatcagtagtccggctctgtgctattaactggtgtgtacaggtgtacacaccagtcaaaatgcttctggaaaaagagtatgtccaatgtcaggtcaacttcagagacttcatctgatgcaacactagaaggttttgtgttgctgtcaaaagcaatctgatgctaatgtgtggtagtatgatggtatatataccaatatgagaatgatggaaaaattactggggtttactcagtatctcatctttcattgtgttctcctctgttgctttcccacttctccatcaggttctggagaaagtagatctatccaaaactaatatctgctgacatgtaagatgaatgacttatatacctcaaagcgatagtcacgttggagagggataggttggtttagagagtcacatcctactggttcatattggactgataatctccttaatggctttatgctagtttaaactcatttataaaacatgagaaagttctcatttaaaatgagataggttttaattgtatattactaaacagatattactaaacagtagctgtccttagaatttgattgaggtaatgaaaatagcattccatagggtttccctagattcctcaagttgctcttcctccttggtatttctgatccttctgacatcagcagagaattaaaaataaagaagtggccaactgccgttcctgtgtcacttactcatgattcctttctctgaagttgtcttccataactcagtggacctggaggtagacctgactggaggaatcagacattctcatttgaaaatttgacgttggacagcaagttggccaagtttctcacatgtagctgggtttacaatgtttaattttggcagctatcaagggaccagattatgctatatagtctaaggagcagaagtacagttttaaatggttgccctcagaacaaaatcactgaaagaaataaaagttggagactgacctgaactcaaagcaaagaaacaaaaaaaatgggaactgctgcatttaattaaaattaataatccttagacatgctcaaaaggagacctcaagaagtaatcacaaaataggacacatctaggagacagcttatttatacttaaaataaattatattacattacttattacatttgataaatgtgttggtactattttccaaagaattatacttttattgatatttttgtgatatgaataaaattatttttaaaacc

SEQ ID NO: 212960 - DNA, 1331 bp, Canis familiaris
atgttcagggcattgaactgcgatgatcacggtgcagcggtacaacaaaatgccttcggctttccgaggaagtcttccgaccgttggacggacaattcaacctcgaattatcggtgtgaaagcggaggaaacggtagagacagcggccgcaatcgcgtcagacgacccatgaacgcattcttggtgtggtctcgcgatcaaaggcgcaagatggctctagagaatccccaaatgcaaaactcagagatcagcaagcagctggggtaccagtggaaaatgcttacagaagccgaaaaatggccattcttcgaggaggcgcagagactacaggccatgcaccgagagaaatacccggactataaataccgacctcgtcggaaggccacggcacagaaaagtcacaaattgctacctgcagcctcctcctccatgctatgcaagcaggtgcacgtagatgagaggttctaccccttcacctacacggacagctgtagtagggctgcacacacacgaatggaggaccagttaagctgctcacaacccatgagcacagccaggtcgctgctgcaacaggagtaccacagcagctccgcaagcctccgtgacagtccggaaaccttggccgcacagatgtccgctgacgcttctttttactctaagtaactaagtaacagctgggactttctgacgcttattttccttagtgatttctttactctggctaacgaaacgtcctattcatactgattttgctattatttcattcaaaatgagcgttggaaacttgcttaacatataaagaattacaaagtatgcaattgactcaggctgggtttatggctgcttaacttgaggagagagcacgttgatactttctgaaactcctggacttccaagaccacttgtttttcttttaaccaaacaactgttatatctaattatagttgctccatagactgagctttaaataagtgaaataataggtgcaagaatatactaataatctgataatcgtcctcataggtaccacaattttcactctttatttttaaaatacttcctttattcatgagagacacccagaaagaggcagagacgtaggcagcgggacaagcaggctccctgcgggggggagaccggtgggggactcgctgtcaggaacccctcccccccacccccccatggggccctgagccaaagtcccacgctctacccctgaagcccccgggtggaccttcactctttattttaaataaatattatttattattatattattatattatattacattatttaaataaatattataaataaatatttttatcaca

SEQ ID NO: 212961 - DNA, 600 bp, Canis familiaris
ttgacgacgatcttctcgtaagcacatccagagtgagacttttctacgtttgagagaagaatgtgtgtgcatttcaagaatttgggttttgggggggaaaggaggaaactgtttacttttttcctccacacatttgattattgacacttcgacccctaattccctatacaaaacccacttgcggccaccaggggaccagttctgtatagataaccagatggctgtttccttccaagccgccatcttccactgaccagactaaactcccaaccccagaccaggccagagggtgagccttgactccttcccagggtgacacagggacaaacgcttaccacgagagccaatgctgttcctgcccccttcatgcctcctccttgggccctacaggcaacacatcttcctttggcccctggttttggaaaaaatcatattcctgacttctgtttagtttttttcctgcaatttctatttcatacattctcatacatttaccttgtaaaatagactgatattattattacataatgaattaaaacatatgaattaaaatattcctacagtcttctaaaaaaaaaaaaaaaaaaaaaaaaaaaaaaa

SEQ ID NO: 212962 - DNA, 600 bp, Canis familiaris
caaagtgaaaaaagctcctggtgttggaaataagaagattcagctgacagttcttgttaagccttcaggtataagatgttacgttgatggatcagaagaaattggaaatgactttaaactaaaatgtgaaccaaaagaaggttcacttccattacaatatgaatggcaaaaattgtccaattcacagaaaacgcccccctcgtggtcaacagatatgacttcacctgttatatctataaaaaatgcctctactgagtactctgggacatacatctgtacagtaacaaaccgagtaggctctgatcagtgccagctacgcctgaatgttgttccaccttcaaatagagctggaacaatcgcaggagctgttgtaggaattttgcttgctctagtgctcattgggtttatcgtcttttgctgtcgtaaaaagcgcagagaagaaaaatatgaaaaggaagttcatcatgatatcagggaagatgtgccgcctctaaagagccgtacatccactgctagaagctacatcggcagcaatcattcatccctgggatccatgtctccttccaacatggaaggatattccaagactcagtataacca

SEQ ID NO: 212963 - DNA, 181 bp, Canis familiaris; identical to SEQ ID NO: 2856

SEQ ID NO: 212964 - DNA, 185 bp, Canis familiaris; identical to SEQ ID NO: 2857

SEQ ID NO: 212965 - DNA, 135 bp, Canis familiaris; identical to SEQ ID NO: 2858

SEQ ID NO: 212966 - DNA, 196 bp, Canis familiaris
tcgattgcatctgcagacatggatttcaaccagctggaggcattcttgactgctcaaaccaaaaagcaaggtgggatcacatctgaccaagctgctgtcatttccaaattttggaagaaccataagacaaaaattcgagagagcctcatgaaccagagccgttgggacagtgggcttcggggcctgagttggagaa

SEQ ID NO: 212967 - DNA, 600 bp, Canis familiaris
actgggaatgttatcatagagacaaaattttttgacgacgatcttctcgtaagcacatccagagtgagacttttctacgtttgagagaagaatgtgtgtgcatttcaagaatttgggttttgggggggaaaggaggaaactgtttacttttttcctccacacatttgattattgacacttcgacccctaattccctatacaaaacccacttgcggccaccaggggaccagttctgtatagataaccagatggctgtttccttccaagccgccatcttccactgaccagactaaactcccaaccccagaccaggccagagggtgagccttgactccttcccagggtgacacagggacaaacgcttaccacgagagccaatgctgttcctgcccccttcatgcctcctccttgggccctacaggcaacacatcttcctttggcccctggttttggaaaaaatcatattcctgacttctgtttagtttttttcctgcaatttctatttcatacattctcatacatttaccttgtaaaatagactgatattattattacataatgaattaaaacatatgaattaaaatattcctacagtcttct

SEQ ID NO: 212968 - DNA, 600 bp, Canis familiaris
ctccagtccccacctaccaccatctagttatttcaatgccagtggccgtgcctatccagacgtggctgcactctccgatggctactgggtggtcagtaacagcgtgcccattccatgggtgtctggcacctcggcttctactccagtgtttggtgggatcctatccctgataaatgaacatagactcctcagtggcctccctcctcttggctttctcaacccaaggctctaccagcagcgtggggcaggactctttgatgtaacccgtggctgccatgaatcctgtctgaatgaagaggtgcagggtcaggggttctgctctggccctggctgggatcctgtgacaggctggggaacacccaacttcccagctctgctgaaggcactaatcaaaccttgaccctttcctgcctggacactgaactggtcccctgccccatagctggtggcttggtctctaattctgcactgtcggaaggcctgttgaaccctcaaccatagactgcaacagacagcttatttccctaaccctgaaatgctgtgagctgacttgactcctaaccctaccctgctccatcatgctcaggtcttcctactccg

SEQ ID NO: 212969 - DNA, 1400 bp, Canis familiaris
aggcattcacaagtgcatttctttcgaaggacccttgtggcagtacagaacaggactatcggccactaatggaactgacaactcaaattgtaccttgtgacaagaccgtcttttggagcaaatcaagtgagctggcgcatgactacacgcgggtccagcgggatatgtacaccctggaggatacactgttgggttacatggcggatggcctcaagtggtgtggagacacaagctcttctgaaatgaactatcaatcttgtccacactggagggaagactgcagcaataactctgtttccgtattctggaacacagtgtccaaaaggtttgcagaagatgcctgtggtgtggtccatgtggtgctcaatgggtccatcagtaacacctttgatgagaaaagcacttttggacgtgtggaagtctttaatttgcatccagagaaggttcatactctaaaggcctgggtgatgcataacatcgaaagtgtccccagtgactcatgctcaagttcctccgtgaataatctgaaacagattctcaagacaaggaatattatatttatctgccagaataactacaggcctgtcaggcttcttcagtgtgtgaaaaatcctgagcactcatcctgcaaatataacttatgagccattcagcgtggtcgttttggatctttgagccttgtatacatcagcatgcgtgactcaggagacatgctgctgggaagctgaggacttggggggcatcttctgtcatcctgccaacactagagctggaagtacttcccccaaagatttaaaataacttatattattgacatagttttttattttgatttcctaatactcatgaaaaaattatggtataaaattagaatgaagattttatattaagttatttcattttcattttcataggtgcttttatgttgtttatatgttggtagcatcctttctgtggagagtgaccataccaaacctctcttattggtgtagattattaagagaaacgttttgaagaaattttacatttctgaatgagtgaccttgtctcaggatatatttttgtaccctttctacaaaaatagttaaatataaatgccatggttatgggtcatgttgggaaaagaattcttgtaggatataaactacccatgtactttacctccccctcttccaatagtcctatgaggttggtactgttatctcctgtttgttagatgagaaatggaagttcagagaggatatgtaatttgcctaaagtcatttatttagttcaaggtagaggctggatttcaactcagctctatctgactccaaagtatatgtgctctctttctaggcctgtaataccagctgacatgctttatgttctcttccaataaatgcatgttggattatatt

SEQ ID NO: 212970 - DNA, 536 bp, Canis familiaris; identical to SEQ ID NO: 2863
  misc_feature (204)..(204): n is a, c, g, or t

SEQ ID NO: 212971 - DNA, 600 bp, Canis familiaris
tgggcccgagagggccttgcccgggacacaggcctcagcgaggccagaatccaggtctggttccagaaccgcagagctaagcagaggaagcaagaacggtcgctgctccagccactggcccatctgtctcctgccaccttctctggtttcttgcctgagtcccctgcatgcccctactcctacccaacaccacctccacccatgacctgcttccctcacccctacaaccatgcccttccttctcagccctccaccggtggttcctttgctcgaccccaccagtctgaagactggtaccccaccttgcacccaccccccactggtcatctgccctgtcccccacccccaaccatgcttcccctcagccttgagccaccaaagtcctggaactaaggtctggacaggagctgctgagataatctccgagcctgtggccctggtgaaatgcagagaaatctgggtggcatctcttatttctaagggtcaagtagaaatttgtggaggagcagctcagagattaggaatttaaaaatggaaaatcatgctgaagaaggccccctgaggtgattagttgagggaatgtagggaggtgaacctact

SEQ ID NO: 212972 - DNA, 284 bp, Canis familiaris; identical to SEQ ID NO: 2865

SEQ ID NO: 212973 - DNA, 600 bp, Canis familiaris; identical to SEQ ID NO: 2866

SEQ ID NO: 212974 - DNA, 600 bp, Canis familiaris
caccatgccaagtggtcccaggctgcgcctatggcaggaggagagcacaaaccccacgaagtggtgaagttcatggacgtctaccagcgcagctactgccgtcccattgagaccctggtggacatcttccaggagtaccctgacgagatcgagtacatcttcaagccatcctgcgtgcccctgatgcggtgtgggggctgctgtaatgatgagggcctagagtgcgtgcccactgaggagttcaacatcaccatgcagattatgcggatcaaacctcatcaaggccagcacataggggagatgagtttcctgcagcatagcaaatgtgaatgcagaccaaagaaagatagagcaaggcaagaaaaaaaatcagttcgaggaaaggggaaggggcaaaaacgaaagcgcaagaaatcccgtccctgtgggccttgctcagagcggagaaagcatttgtttgtacaagatccgcagacgtgtaaatgttcctgcaaaaacacagactcgcgttgcaaggcgaggcagcttgagttaaacgaacgtacttgcagatgtgacaagcccaggcggtgagccgggctggaagaaggaggctccctc

SEQ ID NO: 212975 - DNA, 600 bp, Canis familiaris
cccagcattatcctggcgaaggaaaacaaaccaagaccacttctaattagtggaactgagtcaactcagcaagctgcccatactcagctaagtaacccgagttcactggcaaacattgacttttatgcccaggtaagcgacattactctagcggggagtgtagtcctttccccaggccaaaagaataaggcagggatatctccatgtgacatgcctccagaagtggcctcactctgccaagctaacttcatcatggacaatgcctacttctgtgaggcagatgccaaaaagtgcatcactgtggcccctcacgtcgaggctgaatcacgtgtagagccaagctttaaccaggaagacatttacatcaccacagaaagccttaccactaccgctggccagtctgggacaactgagagggctgtgagttctgagatgcctgtcccagactatacctccattcacatcatccagtctccgcggggccttgtgctcaatgcaactgccttgcccttgcctgacaaagagtttctctcatcatgtggctacgtgagcacagaccaactgaacaaaatcatgccgtagcctttctttggtttccca

SEQ ID NO: 212976 - DNA, 600 bp, Canis familiaris
ctcactgctaagggtatggaatcagtgctacgggaatttgctgcccgcccagagcataagtcctcagacagcacattcttggtgttaatgtctcacggcatcctgaatggaatctgtgggaccgcacacagcgtggaaaatccagatgtactagcttatgacaccatcttccagattttcaacaaccgtcactgcctcaacctcaaggacaaaccgaaggtcatcatcatccaggcctgcagaggtgaaaatcctggggaactgtgggtcagcgactctccaaaagcctcgacagacagctggacacatcaacctctgatgctccagagtgatgccattcacaaggtccacgtggagaaggacttcattgctttctgctcctcaaccccacataatgtgtcctggagacatatcacgaagggatctcttttcattgcacaactcatcacatgcttccaaaaatattcctggtgctgtcacctagaaggagtattccggaaggtacaacaatcatttgaaaaaccagatgtgaaagcccagatgccgaccattgaacgagtatccatgacaagatatttctatctcttcccaggacattaa

SEQ ID NO: 212977 - DNA, 600 bp, Canis familiaris
ccgaggcccggggagacaaggactcgagcgtgtgtggaggtgatcgaatttaggtttcagcgttgtatttgggactgacgctcgaccgagggctttagggctgcagctgcaggcggaggcgcggcaccgctgtgggatcaagcccccccccccgcccccgcccccatctctctttccctctagagaaatgttccctgtgcttaaagagagccggggagggagaatcgctctcgaggagttcagcaaagtcgtgaccacatcagaggagctgccgggtcgatgcccgccccgcctttacactggaaccggcttctaggagcttcagaaactcgagggcaagggcgcgggggcccgggacgcagcacgcactcccggccttcgccgcacagcgcgcccagacccgccgggacccgcgggctcggcgttcggtccggaccgcgctccgttccgcagcccgttgccgccgggcagcgccgccccgagagggccccgagagggccccgggcggccgcggcgcgggcggaccccggcatcgcccgcctcggaccgacgtcaggccccgggcgccaggccccgccccgcgcctgctcccggagctcc

SEQ ID NO: 212978 - DNA, 262 bp, Canis familiaris; identical to SEQ ID NO: 2871

SEQ ID NO: 212979 - DNA, 428 bp, Canis familiaris; identical to SEQ ID NO: 2872

SEQ ID NO: 212980 - DNA, 1400 bp, Canis familiaris
tgtggacatgccttgtggtggaacatataatgcaacttggaccccacagagtatttcatcacccaattcatcaaacccagaggtcccactgtccatgtgtatgtggttccttgaagctcctccacatcagcaggtcaagatcacagtgtgggccctggagctgcactcacaagactgtgaccagaattacttagagtttcgggactcacctgagagtaatggaagtccaggacctcagatctgtggcagaaatgcttcggctacaccaacgttctattcttctaggagtacggcaattgtcatcttcaagtccgaagtcctcaacagaaactctagagtgggttttacctatcagattgcaggttgtaacagagaatataataaggcttttggcaatctgaagagtcccggatggccagataattatgacaataacttggattgcactgttattctcacagccccacagaaccatactatttctctattttttcattcatttggcattgaggactcaagtgaatgcacacatgacttcttggaggtaagaaatggaagtgatagcagttcaccattatttggcacatactgtggaactctgttgccagatcctatcttctctcgaaacaacaaactatacctacggtttaagaccgatagcgcaacttccaatcgtgggtatgaaattgtctggacctcatcaccctctggctgtggtggaaccctttatggagacagtggttccttcaccagccccggctatcccggcacttaccccaacaacactgactgtgaatgggccatcatcgctcctgctggaagacctgtcaccgtcaccttttactttatcagcatcgatgatcccggagactgtgtccagaactatctcatactctacgatggaccggatgctaattctccatcctttggaccatactgtggggcagacaccaacatagctccctttgtggcctcttcacatcgtgtcttcataaaatttcacgcagagtatgcagtgtatccatcagcaatccgattaacctgggacagctgagtagcgctgtgtgtcggctctgggcagggaccatcagacatgccatcccgctacggctttctgcctgggtcactgggaaggatctgaactttttttttttcaccaaagtatgtgtggaatcaatgtctgcacatttaaaaaaaatatagaatgtagcttctttactcctggctatgagtgtcatccttctaacacttggagctgaaatttgtaaaaactccttaatgagttggaaatgattatgacacatgtgatgtaaattgtcaaaaatggtgaaataggagtatgattttccctgtgaatgtcaagtgaggggtaataaacataattgaatggtaaaaaaaaa

SEQ ID NO: 212981 - DNA, 600 bp, Canis familiaris
aggacatcctgcggacggagctggctgctgaggtgcaccgcgtgctgtgcctcgagcggggccacatgtttgtgtgcggcgacgtcaccatggcaaccagcgtcctgcagacggtgcagcgaatcctggcgacggagggcgacatggagctggacgaggccggcgacgtcatcggcgtgctgcgggatcagcaacgctatcacgaggacattttcgggctcacactgcgcacccaggaggtgacaagccgcatacgcacccagagcttctccttgcaggagcggcatctgcggggcgcggtgccctgggcgttggacccgcccggcccagacaccgtcggcccctgagagcgctcgttttccatcccagttccaagagaggggccgtcagtccactctggctctgcccctctcctgcgggcgttaccagccacttgtcccctcccgaggtgccttcccgtctctgtccagagtctgccctaagtcgccttcttcccaggaatgagtgaaatgtccttcctcgccccaggtcccgacgccccctggagcaggggtattccagggcctactgtcaccccttttgtgttccttaggtgaattt

SEQ ID NO: 212982 - DNA, 1400 bp, Canis familiaris
tccaaccatgcaaattatttaagatttcttcagtgggtatcttatgcttccaagtctttgtgtcacactgctcattgcctgagatgtttactcgtgccgaattcggcacgagcggcacgagtacggtcgaacagtttttcaggaatatatatcaatacctgtttccttttgatgaggataatgaaaaagatctccctgtcggtgaaaagttcattgaggaggatgcacaagtagctcaaatagagaatgtgttcaaccagctgactgtggatgtgagatttctctttaacagaagtcttaatgtcttcaaacagatgcagcaagaatttgaccagacttttcaatcatatttcatgtcagatacagacttaatgcagcctaactttcttccagctttatctaaagagccaaggaaaaaagcagatcctgtgcaaagttgggatattcccagcttcttccagctgttttataacttcagtctctctatttatcacagtatcagcacaacaatcaccaagacgctgaatgcaatagaggatttaccaaaacaagacaatgattctaaccatggaagcctgagttcaaagacattgcctgtgcagcacagaggaccgtatggagaatttggccagaatttgtcagaatgtttccagtttcatgccagatgccaaaaatgtcaggattacctgtgggaagactgtcccgatgtacctgaactacacacaaaagtagatgaggccctcgaattggtcaacatatcccatcagcaatatgcccaggttctccagatgacccagcaccacctggaggacaccacatatctgatggagaagatgagagaggaatttggctgggtggctgacctggcaaaccaggccccaggagctgagaacatctttgattccacaaagatggttccaaacatacatgaagggaatttttccaaacaagacgaaacgatgatagacttaagcattctgtcttcccctaacttcacactcaagatccctcttgaagaaagtgctgagacttctaacttcattagctacatgctggagaaagctgtgcagcattttaagaaacattttaaaacttggtaagacctgaggcatcctatacctgccaagtagaattacctcttcgggtacctctgagatctgaaaatcccaaatgtataagataatgtaataaatgaaatagcaggaaagtatgtcagttacatattatgaattactgttaattttcttatgttgaatggcagtttcatagctattggaattgagttaaagtaaaatccctttttaagaaaatcacatgtacacattactaaattctatggtaggttagtagttctatgtatattaaataaatataaaattaccaaaaaaaaaaaaaaaaaa

SEQ ID NO: 212983 - DNA, 1400 bp, Canis familiaris
agatatgggtctcatgtatacttttggagatggtcgacatggaaaattaggacttggactggagaattctaccaatcagttcattcccactctgtgctctaattttttgaggtttatagttcaattggtgtcttgtggtggatgtcacacactagtttttgccactccacgacttggtgggacagaagaaatggagttaaaagaaataaacaaatcttgcttctctgcagcaacttctctgtccctcagcaatctgagctcaggaattgtactgcatcaaactctatcagcacgtgtgcggcggagagagagggaaaaatcacctgattcttttcaaatgacacgaacactacctccaattgatgggattcctatgccacctgtttgcttttcccccagtccaattcctttctatatggctgcaagtaattggtcagggaaaatgacacctgaaaaggagggcctcacgcagccagaaccagattattttcgagataacatggccaaagggaaagaaacagataattcttcggcaacagattcagaaagccttggagaaactaccgatgtcttaaacatgacacatatgatgagcctgaattccaatgacaagtccctaaaattatcaccaattgataaacaaaaggatcatgagttttcagaagatgaagaaccagaggatatggctgaggaacttgatgaagatctggaaagcaagaagaatgttccagcagatgtggccagtgacaactcccttaaaaaggacgagacaaccaaacaagaaaaacgagctatttgtgaatacaatgaaaatccaaaaggaaacatgcattatcatgcaaagagcagttcttcagaagtcctgaatgatagtgaatcaacaccaaataaagatgtgaaaaaatcaaagaagattttcctctttaaaaggatgtcattgatgagtcagaaaagtatgcagagtaataatgagccactcccagagataaaaccaataggagatcaaatagcttttaaaggcaataagaaagatgccaaccagaaccacatggggcaaaaccatcaggatacttcacccccagatatggagagaagatcaaaatcttgtacaatactataaatatatatttatgtttccgtggtcaccaagcacattgtattttatacttgaaaaacattttgacttctgaaagaaagttcctgataacaaacttttaaagatataataatatgttttatttgatttgaatattatgaccagtcttggtatttatttatgctaatatttttgacgagcaatttcaaaataagtgtatctcaaactctccttcaagtgttgtggccttaactgttcagtgttggaataaaaaatatatttttataaaaaaaaaaaaaaaaaa

SEQ ID NO: 212984 - DNA, 600 bp, Canis familiaris
  misc_feature (541)..(541): n is a, c, g, or t
gcagcaacttctctgtccctcagcaatctgagctcaggaattgtactgcatcaaactctatcagcacgtgtgcggcggagagagagggtatagagttgtggccagttctatatcattgcattgcaaagaaaatgggaaataaaactcattttcttttttaatcaaagaagagtctttaaagatagatttactaaataaaatggttagagttgcaggcttacaaacttaaagcaaattcagagttaagctgttaaacacacaaatgagaaaattaaaatgatcatggataaccttgacttaacagaatggacacaaggatacaaagcatccttttagaggcctatctaggcacttcatattgaatgctgaattgttttcttaactctagatggattgacttttactttgctttttatcttttagttacaccttatgggcccgtggaaggttatacactagaaacaatgaaatgtggggaaacaagagaaataaagactttagtttgagatagggaatgttctttcttcatttaaaattaaangttctcattcttttaaaattattattttcaatgacttcttattttttaaaaaaaaaaaa

SEQ ID NO: 212985 - DNA, 600 bp, Canis familiaris
gacagttacttggaaggtgaaagcgaaagtcagcaaggtaccactgatggcttcgagcagcctgagtcagtagaatttagtagtggagagaaagaggatgatgatgaagtggaaactgaccaaaacttgtggtatagcagaaaatttatcgaacaaggacacaaggaagagaccgaacacatactgtccaaattcatggcaaaatatgattttaagtgtgaccacttgtcagagattccagaggagcaggaaggagcagaggattcagaaggaagtggaatagaggagcaagaggtagaggcaaatgagaatgtggaggtgcctgcaggaaaagaggagaaggaaatagagatcctgtcagacgacctgacagacagagcagaggtgagtgaaggcaagggaaaggcaggaggtggaggtgagggaatccagcgggagggtgattcaggagtggaacagaggcaaagtgaggaggggcaagaggaggaagacaagagaggaggagaaatggagggcctggctaagggagagaaaaacctagaagaggaggaggcccaggaacaaagggagagggaacaaggccatcggaaaaaaaaaaaa

SEQ ID NO: 212986 - DNA, 103 bp, Canis familiaris
gttcaatcagtacatcgtgtgcctggcccatcatgtcatagccatgtggttcattagatgccgcctgcccttccggaaggattttgttccttatatcactaag

SEQ ID NO: 212987 - DNA, 600 bp, Canis familiaris
cccattggcttctggtgggccgtggtcaccatgacgacgctgggctacggagacatgtacccgcagacgtggtccggcatgctggtgggagcactgtgtgcgctggcgggcgtgctgaccatcgccatgcctgtgcccgtcatcgtgaacaattttgggatgtattactccttagccatggctaagcagaaactaccaaagaaaaaaaagaagcatattccacggccaccgcagctgggatctcccaattattgtaaatctgtcgtaaactctccacaccacagtactcagagtgacacatgcccgctggcccaggaagaaattttagaaattaacagagcagattccaaactgaatggggaggtggcgaaggccgcgctggcgaacgaagactgcccccacatagaccaggccctcactcctgatgagggcctgccctttactcgctcgggcacccgcgagagatacggaccctgcttcctcttatcaaccggggagtacgcgtgcccgcctggtggaggaatgagaaaggatctttgcaaagaaagccctgtcattgctaagtatatgccgacagaggctgtgagagtgacttgacca

SEQ ID NO: 212988 - DNA, 154 bp, Canis familiaris
aggacgggtactcgctggaagagtgcctcgagttcattgccatcatctacggcaacacgctgcagtccatcctcgccatcgtgcgcgccatgaccacgctcaacatccagtacggagactctgcccgccaggacgatgcccggaagctgatgca

SEQ ID NO: 212989 - DNA, 600 bp, Canis familiaris
tctcccacctcctgcaggacacctcccagcagctggccgccctgaagccctggatcacccgcaggaatttctccgggtgcctggagctgcagtgtcagcccgactcctctacattggtgcccccaaggagccccggggccctggaggccactgccttgccagcccctcaggcacctcggctgctcctcctgctgctgctgcccgtggctctcctgctgatgtccactgcctggtgcctgcattggcgaaggaggcggcggcggaggtcaccctaccctggggagcagaggacactgaggcccagcgagcggagccatctgcccgaggacacagagctgggacctggagggagtcagctagagactggtcccttcctcgaccacgcagccccgctcgctccctccccaggatcaaggcaacgcccgcccccaacgcccccaaagccagccccagccccacctctccccctctgtacaaagtccttgcccccaagaaattgtatataaatcatccttttctaccaaaaaaaaaaaaaaaaaaaaaaaaaaaaaaaaaaaaaaaaaaaaaaaaaaaaaaaaaaaaaaaaaaaaaaaaaaaaaa

SEQ ID NO: 212990 - DNA, 476 bp, Canis familiaris; identical to SEQ ID NO: 2883

SEQ ID NO: 212991 - DNA, 1400 bp, Canis familiaris
cacagtcccttggtcttcttgttccggcaccttcctagcaccttcctggctttgccccgtgtccgccagtctccacggggggaggcccacagtgactgtggcctggggggagatgggagaaactcatggcctcgtgggctgatggcccgggatacactcaggaataatccacacgccactctcagagcccccaacctcgttctcccacttacagccgctccctgatatttgcctcctcctcctccatcctggctcccactacctgccgccaggcaagggccagtcccctagctcccctggccgggatataggcagcccgcaagagaaaaggtctctgtgcaggaagcaggtgtcttgctgcccagcgttcatgcctccttcaggcacaaatccgccccatctcacaccaggcatggcttcctcgccctccaggtcccagggcactcctgggaactaaccctcacctccccacggtcctccctgatctatcctgcccaagggtcaggtgtgccctccagctgctggggccagggcttctcccaccaagaccgaggctcagggcagccaggccactgggtctctcagccaccagccctactgagactagttctttgtgttcgtcttctagaggtggacagatgggggttcaaagtcaacatggcaggcccctttgatgcttcccatgctcggaagtcagaggccctcctccccaaatcagcgacaggatgcctgccgctggcctgcctttcctatgaggtggtcccaggtgctctgagcccccagaagccctcatttccacacccacggctcccctgctccctccttttgtgctccgtccagttgtgtagttttaccccctgtctgacatcctcctgcctcccctcccctatgcccaggctccatcatcccccaaataagacactcatagtcagaggtgccaccacattctgtttagtaccattgaacacagcctgtcgccctccaacatgacatcccttccacctccccaggccgagagagagagggtgcagcctggagagggggactggcagtgggcatttgagcccatgtccatgtgtatataatctataatatttatatatatatatttatatataattctctctgtaatatatgtcatagaatctctcttgggcctggggtgggaatgtcgcattaagaaaacatgctaagactggccataaaaatggatatttcccagacctggaagacagagtatgggacgtggaggtgagggcaaagagaaggtcatacgctcattcaccaagagcccctcccaagcacaagggtaagaagggaggcgtagggggaggagggccagtggaaggggaggaatgggaaatttggatttttctttaataaagtgatttgaaaacgag

SEQ ID NO: 212992 - DNA, 1400 bp, Canis familiaris
cgacgaggaattcctgcggtacctgtggagggaatacctacacccgaaagaatatgagtgggtcctgatcgctggctacatcatcgtgttcgtggtggctctcgtgggcaacgtcctggtttgtgtggctgtgtggaagaaccaccacatgaggacggtaaccaactacttcatagtcaacctttctttagctgatgtgcttgtgaccattacctgccttccagccacattggttgtggacatcactgagacctggttctttggacaatccctctgtaaagttattccttatttacagactgtgtcagtgtccgtgtctgtcctcacactgagctgcattgccttggatcgatggtatgcaatctgtcaccctttgatgtttaagagcacagccaagagggccaggaacagcattgtcatcatctggattgtctcctgcattataatgattcctcaggccatcgtcatggagtgcagcaccatgctccctggcttagccaataaaaccactctctttacagtgtgtgatgaacgctggggtggtgaaatttaccccaagatgtatcacatctgtttctttctggtgacatacatggcaccactgtgtcttatggtattggcttatctgcaaatatttcgtaaactctggtgtcgccagatccctggaacatcatctgtagttcagagaaaatggaagcccctgcagcctgcttcacagcctcgagggccaggacagcagaccaagtccaggattagcgctgtggccgctgaaataaagcagatccgagccagacggaaaacagcccggatgctaatggttgtacttttggtgtttgcaatttgctacttaccaattagcatcctcaacgtgctaaagagagtatttgggatgtttacccacacggaagacagagagaccgtatatgcctggtttacattttcacactggcttgtatatgctaatagtgctgcgaacccaattatttataattttctcagtggaaagtttagagaggaatttaaagctgcattttcttgctgttgccttggagttcaccatcgccaggaggaccggctcacccggggccggacgagtacagagagtcggaagtctctgaccacccagatcagcaatttcgacaacgtatcaaaactctcagagcaagttgtgctcaccagcataagcacactcccagcagccaatggagcagggccacttcaaaactggtagaacattcattcatatgacagggatatctgaggaaaactactcttttctaaaaatctctgtgtacacaaactttattaccctaatgatctgaagctaaaattacgttgtggaccttttttgttttttaatctattgctttttggaaataaaaaaaaagtcagtttaaaat

SEQ ID NO: 212993 - DNA, 600 bp, Canis familiaris
gctttatggaaaggtgccatagagacacaaaagggtggagttttcagagggcagctgagggctcatctcatatctctgcttctcattgaatctcttcttcctgttgtctatccccggcaccacgcgctacactgtcctaaggcttcccattaagaacgtggaatctactatgtaggaactatttctacaaatctttcttaagggtgttacaaaatagaactttcctttactctggtagtcttgaataattatatttgaggactaaaactgagggatggtttctatgagattttcattaaaaattttgaaaactttactactgagtaacctatttggatggtgaaactgaagataattttcaccatcagaagacacaagacatgaaatttgaaatccatactttttttttagattccacatgtaagtgagatcatgtggtatttgtctttgcaatcctctcttgtattttttctttgaatcacttttttcccttgaattcacaagtcatatttataaatttcgatttgacaaaggatgtatatttttgagactatattttaaaaaggaaaggaaggaaaaaaaaaaactcgtgccgaattc

SEQ ID NO: 212994 - DNA, 600 bp, Canis familiaris
tagcaaaaccagaaaagactgtttctcatgggaaaccagaagaaaaagttgtcaagcaggtaaaagctacagaaaaagcagctatagaaaaaacagtcaagcccaaaccagcaaaaaaagctgaacatcaagaaaaagaatctccaactataaaaacagacaaacccaaaccaacctcaaaggaaacaccagaagtcacagaatcagggaagaagaaaattgaaaaatctgaaaaagaaagtaaagaaaaagcagaaatgaaacatcttaaagaagaaaaagtctcaacaagaaaagaaagtcttcaatcacacaacgtgacaaaagcagaaaaacctgcaagagtatcaagagaagatttggaagatgtatcagcttcaaagaaagctaaagaagaagctgaagatgtgtcttccacaaagaggcaaaaaagccccatcagtttcttccagtgtgtctacttggatggatacaatggctacggatttcagtttcctgtcactcccgcataccgtcctggagagagctctggccaaccaagttctccaggacagaagcaacaaggacaatagaccccctacgcacacacctgtcctcgag

SEQ ID NO: 212995 - DNA, 600 bp, Canis familiaris
ttgtcccaaatgtcagtcattttgagccgaaatacagagtgagactttagtctctgagagtacaataagcatactgtcctctagccataccttccttttattttagggataatgttcatactctaaattctgcttcccagggaaactttctaattgactcattcccgctgttgaattattgacaaggtcaattttacataggatcatcgtcctaatctctctacgttgacccaaatctctttgactatatctataaaaccatatagaggacagaagacatcccctacatgtattcctcttgcccttccccaactttgcaccataaaaaacttgtgttgcaagactaatcttgggttctcagggaggaatcttgcacaagaaaaataaaaaattgtttcttcctgctctagttcaattacttaaaaagaacacgtgtcttataaaacaacccctgtgtagataaatacagtgaaatacagtgaaggcaaggggtagatgtgtattggcaggtcagggaataattccaattggcaaaaattttagggcaggagagttgcaaaggatgtctgcagctggacacattttcctcgtgccgaattc

SEQ ID NO: 212996 - DNA, 600 bp, Canis familiaris
aagtaattcccctgaaatgtctcgtagagtttgcccatgtgttgattaaaagcaaattccctgtcttcaggaactctgagaatctatcttccgtgtactctttaaatatttcaaagagatttgtagtgggaactgtgatcttcgaggcagctgattacggaacccactgagtttctgctctatcctatccagtctggggaaataattattgaaatttcaaagtatgtttcataatttgctctccatttgataacagattaggatgtaattggcatatacagaggctgctgtacctgttgacaaacataagagagcacagtcaacgttaactttaaccaggttcaaatattcaaatttgtttgtgtttggtttgtattcacctggcatagggacatcaagtgagattatttgatctatgctttactttctttgtttcagctgtaaaattctaatttggatttctaacaaaaaagacatttgtaatccccacattctttcaatcccagactcattaaccgagaaggccccatcatttttactctcctcacccatagaggacagttatgttggctgtgcctcttttaataccacctcttgatt

SEQ ID NO: 212997 - DNA, 600 bp, Canis familiaris
tgctgcctgtgggggccactgtcaatatggacgggactgccttgtatgaggccctggccgccatcttcattgcccaagtcaacaactatgaactcaacctgggccagatcacgaccatcagtatcacagcgacagcagccagcgttggggctgctggcatcccccaggcaggtctggtcaccatggtcattgtgctcacatcggtcggcctgcccactgaagacatcacactgatcatagctgtggactggttccttgaccgacttcgtacaatgaccaatgtcctgggggactctattggagcagccgtcattgagcatttgtctcagcgagagctggagctgcaggaggccgagctcaccctccccagcctggggaaaccctacaagccactcatggcacaagagaagggggcgtccaggggacggggaggcaatgagagtgccatgtgaggggcccccagctctgctgcccagagaggagggaacggggctggggggagggggaggtcctagggaagacccactgcctgaatgactgcactgaacacacatgttctgtctagcttgtttggtggaaactgagataaaggagcaggaa

SEQ ID NO: 212998 - DNA, 600 bp, Canis familiaris
tccagatgcactacgagatgctcttcaactccttccagggattttttgtcgccatcatatactgtttctgcaatggcgaggtacaggccgagatcaagaaatcctggagccgctggacactggccctggacttcaagcgcaaggcccgaagtgggagcagcagttacagctacggcccgatggtgtctcacacgagcgtgaccaacgtaggcccccgcgcgggacttggcctgcccctcagcccccgcctgctgcccgccgctgccgccaccaccaccgccaccaccaacggccaccccccgatcccgggccacaccaagccaggggccccgaccctcccggccacaccacctgccacggctgctcccaaggacgatgggttcctcaacggctcctgctcggggctggacgaggaggcctccgcgccggagcggcctcccgccctgctgcaggaggagtgggagacggtcatgtgatcggggacctgtgccagggttggactcgtggacataagggccgacagacggaccaagagacaggcggttggacagttgcccactcagggctggggctgggaagacaaaacaaaaaaaaaaaaaa

SEQ ID NO: 212999 - DNA, 600 bp, Canis familiaris
taatgtaactttaactaatgtcagactggaggggcctaccccagctccttctacttcttactcaccacaagctgattctttaagaacaccaagcactgaggcagctcacataatgctaagagatcaagagccatcattgccgtcgcatgtagagccagcaaaggtgtatagaaaagatccctatcctgaggaaatgatgagacagaaccatgttttgaaacagccagctgttggtcacccagggcagaggccagacaaagagcctaatctgagctatgaatcccaacccccatatgtagaaaaacaggccaacagagacctcgagcagcccacatacagatacgactcctcaagctatacagaccagttttctcgaaactatgatcatcgtctccgctatgaagagcgcattcccacatatgaagagcagtggtcatattacgatgacaaacagccctaccagcctcggccttctcttgataatcagcaccctcgggaccttgactccagacagcatccagaagagtcctcagaaagagggtcttacccacgttttgaagagccagcccctctgtcctatgacagcagaccacgctatga

SEQ ID NO: 213000 - DNA, 212 bp, Canis familiaris
gtacgtgccctggaactttcacgaaccccagccgggacagtaccagttttctggggagcaggatgtggaatattttattaagctggcccatgagctgggactgctggtcatcctgaggccgggaccctatatctgtgcagagtgggacatgggaggattacctgcttggctattattaaaagaatctattattctccgttcttctgatccag

SEQ ID NO: 213001 - DNA, 600 bp, Canis familiaris
gctgatcggcgtcgatacagacgtggttactatggcagacgccgtggacctccccgtaattacgctggggaggaggaggaggaagggagcggcagcagtgaaggatttgacccccctgccactgacgggcagttctctggggcccggagtcagctgcgccgcccccagtatcgccctcagtaccggaggcggttcccgccttaccacgtgggacagacctttgaccgtcgctcacgggtctttccccatcccaacagaatgcaggccggtgagattggagagatgaaggagggagtcccagaggggacacagctgcagggaccggttcatcgaaatccaacttaccgcccaaggtaccggagaggccctcctcgcccccgacctgccccagctgttggtgaggctgaagataaagagaaccaacaagcagccaatggtccaaaccagccatctgctcgccgtggataccggcgcccatacaactatcggcgtcgcccccgcccccctaatgctccttcacaagatggcaaagagaccaaggcacctgaagttccatctgagaaccccgctccagccaccgagcagagcagtgctgagtaa

SEQ ID NO: 213002 - DNA, 1400 bp, Canis familiaris
actatttatgtgctggaagaaatgactgcattgttgataaaatccgcagaaaaaactgcccagcatgtcgccttagaaagtgctgtcaggctggcatggtccttggaggtcgaaaatttaaaaagttcaataaagtcagagttatgagaacattggatgctgttgctctcccacaacctgtgggcattccaaatgaaagccaagctctaagccaaagaatatctttttcaccaagtcaagatatacagttaattcccccattgattaacctgctaatgagcattgaaccagatgtgatctatgcaggacatgacaacaccaaacctgatacctccagttctttgctgacgagtcttaatcaactaggcgagagacaacttctttcagtagtcaagtggtctaaatcattgccaggttttcgaaatttacacattgatgaccaaataactctcatccagtattcttggatgagcttaatggtgtttggactaggatggagatcttacaaacatgtcagtgggcagatgctatattttgcacctgatctaatactaaatgaacagaggatgaaggaatcatcattctattcattatgcctcaccatgtggcagatcccacaggagtttgtcaagcttcaagttagccaggaagagttcctgtgtatgaaagtattgctacttcttaatacaattcctttggaaggactaagaagtcaaaaccagtttgaagagatgagatcaagctacattagagagctcatcaaagcaattggcttgaggcaaaaaggagttgtctctagctcacagcgtttctaccaactcacaaaacttcttgataacttgcatgatcttgtcaaacagcttcatctgtactgcttgaatacatttatccagtcccgggcactgagtgttgagtttccagaaatgatgtctgaagttattgccgcacagttacccaagatcttggcagggatggtgaaacctctgctctttcataaaaagtgaatgccatttttatctttaacaattaaattttgtggtatgtctgtttctcttttggtcaggattgtgaggtcttgggattttacaattttcttctcaaagccttacatttataacatatcacattgtgttaatttcagaaaaaaatgtgaagttttgttttctgtataatgcataattagaattttaaggtgtttctgtgtgcccatatattctttaacagttcacaagattaaaaaagtactaaaattgtttgccaaagtaaacttagtcttttccatgctatttcatatcatttaagtgaagatttttaacttttgcatctaaccaatcttctactctagaggaaaaaaaatcttatatgtaaaaataaaaagttattttatgttcctcctaggt

SEQ ID NO: 213003 - DNA, 1400 bp, Canis familiaris
ttctcactggagcgctgtccaaaaagctatctcagagcagataaacactgttgatgtgttaaccacaatgggagctattcctgcaggattcaggccttccacactcttccagcttctggaggaagggaatcagtttcgagcaagttacttcttacaaccagagctcactccttcacaactagccttcagagatctaatgtgggatgctaaaacaggcactattagatcaagaccaagtcgtgtttcattcattctgaccctctggagctgtaaaatgattcctcttccaggaacgagcatccaggttctcagtagacatgtacgcctctgtatatttgatggtaacaaggttctgagcaacattcatacagtcagagccacatggcaatctaaaaagcccaaaacatggaccttttctccccaggttactggcatcttgccctgcttgcttgatggtgattgttttatcagatccaattcttcatccccagatcttggaatattatttgaacttggaatttcttatattcgcaattcaactggtgaaagaggagaattaagttgtggctgggtgtttcttaaactttttgatgccagtggaattcctattccagcaaaaacatatgaactattcttgaatggtggcaccccttatgaaaaaggtgttgaagtggacccttcggtatccagaagagcatatgggagtgttttccatcagatgatgacaatgagaaggcagcctcaactcctagtaaagctgagatctttgaacaggagatcaagagacttgctgagtttactgccagaaacattaattggaagtatgtgtaccattcatttgttgatattttatcgccaaattcttggagatgtactcctgaaagacaggacgagcatgcaaagtgctgatttaattagtaacccagtgttggccaccttccccaagctcttggagcagcctgacatgatggatgcactcaggagttcctgggctgagaaagaaagcacattaaaaagatcagagaagagagacaaagagttcctgaaggccatgtttctcctggtttaccacgactgtgtggtccctcttctgcattccacactcctgcccccattcaggtgggcagaagaagagacagaggctgcccggtggaaagtaattgctgacttccttaagcaaaaccaagaaaatgggggtgccctccaagctctgctgtcaccagatggagtccatgaaccttttgacatttcagagcagacctatgacttgttgggtgaaataagaaagaatgtagcctgaagtggtggtctttgaccctcaagcttcccactgaatctgatggaccctccttgatgacctgaataaaatgacagaaccaaagtaaaaaaaaaaaaaaaaa

SEQ ID NO: 213004 - DNA, 1400 bp, Canis familiaris
ctctgcaagtcacttttcccaatgaaacactgaacttatcagagaaatgtatatagtagctaaggaaggaaatacagcactatttctggaagcatataaaatcctgtgcaatagacacataaatgaggtgtttggctgtgctcagaagggctgttttgtccttcaactcacattaaagaacatctgggctctctagcacttttcaaacaatcaagttgattcatacgggaacccatggtctgaagcgcattggttgtcacttcactatgacacaggatttctgtcaccacttgatggctgggaaggcctaccctcagtttttctacttgataggaggatggcataagttttgctattttcataacatccagagctttttatctggcacacagcagcaggccaggtacagaagggctctattccaataaactatgaggactgatcttgtgatttaagtgtctcactaaagcatgaaatgtgaattttattgttgtaaatatgacttaaggtatttaaagtattttcttctctgtgagaaggtttattgttaatacaaggtataataaaattatggtaaccctcttcttcccagtataaccagctgaagttgcagatgttagatttttttcataaacaaggtcaggccaaaatgtggaaaatatacaatgagactcatagctataaaacagatataaatttttaaaagaaagagtttagtattataaaaggaataaagcaaaatactattttaagacatgaagactataatccaaaatattaaagttctttccaagctatgtattataatacatagtgaaaaatttttagtgatgctacatgtattcagaaaactgtgatttcaggagaagctaaccgctggtaaatattttctactttcctccccactgatactttttaaaatatgacaaattttaaaaagtcttaaataacccataattgaagtgtgtaatataaaagaagtctaagcaacttgttttccctcttaaactgttcatagttttactttcctaaggaatgatctagaatatcctttaaaatgtaagaggaagaaggcacattgccccatgaaggcctttatgatgagatgtggaagtatcacagatgccataggagtttaacaacattaggaaattggacacatgaggataaccttctagcagttttgtgtaacacccagtgatgctgtacacatttgaaggacctttctcaaggaactactaagcatgttttgttgcttaaagtgtttttgtgaattgcttggttgtaattaaattctgagcctggtagttgatacagttttaagaagcagttgtaccaactgaaattattttggagattataataaataaatacactcagtctgagttccatataaaaaa

SEQ ID NO: 213005 - DNA, 600 bp, Canis familiaris
  misc_feature (83)..(84): n is a, c, g, or t
  misc_feature (306)..(306): n is a, c, g, or t
  misc_feature (311)..(311): n is a, c, g, or t
  misc_feature (319)..(319): n is a, c, g, or t
  misc_feature (324)..(324): n is a, c, g, or t
  misc_feature (338)..(338): n is a, c, g, or t
  misc_feature (382)..(384): n is a, c, g, or t
  misc_feature (394)..(394): n is a, c, g, or t
  misc_feature (466)..(466): n is a, c, g, or t
  misc_feature (559)..(559): n is a, c, g, or t
  misc_feature (567)..(569): n is a, c, g, or t
tagcaacatcgtgagaactgcttctttccatatgtgtagatatatgtattacagatacatatagaagaattactgtggggagnnaaggggggtaccacggtttgaagagatcacagcaaaaaaaaaaaaaaaaagagaaagagagagagaatctactggactgaagwaagacagaattttgctaggaatactcgtgaactacttgtcgcattggggtcctggcttcgtgggtttgcgaaatggacacgacacacaaacttgagtagcttttctggttcggagaagtcagccttgcctggggtgggngtggngtaccagnaaggnaagggtgggggggngtggagagtcaacttagcgtatggtctacctgatttccaagagnnnaaggcagtgnccatatgtttggggacctggggatgggacagttctgagtataaaaatgctcttaacaatctgatgtcagcangcttagaggctgtgtggagacaggcagcagctcctgtgcttgctgctgctgctgctgggtctgctgtgattgctcttggtccttgagcagcangttactgnnnttaaaggctttatggtaaagttgtactcgtg

SEQ ID NO: 213006 - DNA, 395 bp, Canis familiaris; identical to SEQ ID NO: 2899

SEQ ID NO: 213007 - DNA, 600 bp, Canis familiaris
tgcctgagcacggagggcatcgagtgcaacgggcgcggccgctgtcgctgtaacgtgtgcgagtgcgacgggggctaccagccgccgctgtgcggggactgcctgggctgcccgtcgccctgtggccggtacatcacctgtgcccagtgcctgaagttcaagcagggcccctcggggaggaactgcagcgtggagtgtgggaacgtgggcctgctgagcaaacccccggagaaggggcgcaggtgcaaggagcgggatctggagggctgctggatcacctacacgctgcggcagcgggccggctgggacagctatgaaatccacgtggacgacagccgggagtgtgtggggggcccccaaatcgcccccatcgtgggcggcaccgtgtcgggagtcgtgctcatcggcatcctcctgctggccatctggaaggctctgacccacctgagtgacctccgcgagttcaagcgattcgagaaggagaagctcaggtcccagtggaacaacgacaacccccttttcaagagcgccaccaccacagtcatgaaccccaggtttgctgagagttagggcgctcggcggagacggcgctggctgagc

SEQ ID NO: 213008 - DNA, 600 bp, Canis familiaris
gaatctagagctgccttggagatgctccgaacacagttgaaagagttaaatgaggaaatagcagcattgtgtcatgaccaagaaatccagaaggtcaaggaacagagtctggaccccttggtgcaggaaatacatcagctgagaaacaacactgaaaagctgaaagcccgcctagaagctgatgaaaaggagcagctccgggtcttaggaaaactgaaggaaactgaacatcaggcccgcttgcttaaggatagagtggagagccttgagagagaactagagatatcagggaaaaaccaagagtgcgtggttcttgaggccgagaattccaaagcagaggtagggactctaaaagtaaaaatagaagagatggcccaaaatcttagagatttggaattagatcttgtccacataaggtcagaaaaagagaatatgataaaagaattacaaaaagagcaagaacgggtatctgagttagaactcttaaattcttcctttgaaaatctcttgcaagaaaaagagcaagaaaaagtacagatgagtgaagaatctaaaactgcagtggggatgcttcagacacaattaaaagagctaaatgag

SEQ ID NO: 213009 - DNA, 600 bp, Canis familiaris
gtggccttcctggctgtcatcacttacaaccgcttccaggcagtgacccggcccatcaagacagctcaggccaccacccgcaagcgtggtttcttggtgtccctggtcatctgggtggccattgtggctgctgcatcctatttcttcatcctggactccaccaacgtagtgcccagcaagtccggctcgggcaacatcacacgctgctttgagcattatgagaagggcagcgtgcctgtcctcattgtccacgtattcatcgtgttcggattattcatagtattcctcatcatcttcttctgcaacgtggtcatcatccgcaggctgctcatgcagccggtgcagctgcagcacaacgcggaagtcaagcgccgggctctgtggatggtgtgcaccgtcctggccgtgttcatcgtatgcttcgtgccccaccacctagtgcagctgccctggaccctggccgagctgggcttccagagcagcagcttccaccagggtatcaacgatgcccatcaggtcactctctgccttcttagcaccaattgtgtcttagaccccatcatatactgtttcctcaccaagaagttccgcaagcacctc

SEQ ID NO: 213010 - DNA, 1400 bp, Canis familiaris
tgaaagtcctagagtttgtggccaagatccacgatacagtccccactgccttcccagtctggtatgaagaggctctgaaagatgaagaagagcgagcccgagccagagttgtagccaaggcttgcactgctgctgtggccagtgcacgtggcaaggccatggccagcagcttctcctgccccaattactgagtcatctgtctgcccatctgcctgctgcccttgtcaaaagtcaccatgccgcggggtcagaagagtaagctccgtgcctgtaagaagcgccgccaggttcgagaagagctgcaggatctggtgggtgctcaggccactgcagcagtgggagaagttttccactccccttcctctctttgtttcaagagttcacctgctgctgggtcatatagcgtttcccagggtcctcagggagccatatccaccagcactactgctgcatctgtttcacacacaagatcaaatgaaagtgctgacaaccaagtggaggaaagaccaagatcctcccaggctcagcccaccgctgagccgttccccagaggcccgctagatgagaaggtagttaaattggtgcattacctgctgtacaagtatcaaatgaaagagctcattagtaaggcaggaatgctgagaaatgtaattcaaatgtataggaatcactttcatgagatcctcaagagagcctctgagcacttggagctggtttttggccttgacttgaaggaagtggatcccaaccggcacatctatgtccttgtgaacaaattggaactaagttatgatgcaatgctgagtgatgatgaaggggttcccaagactggcctgttgatgactattctgggtgtgatcttcacaaagggcaactgtgccgctgaggagcaagtctggcaagtattgaatgtgattgggttatatgcggggatggagcacttcatttttggggagcccaggaagctcatcaccgaggatttggtgaaagaagagtacctggagtacaggcaggtggccaacagtgatcctccacgctatgagttcctgtggggccccagagcctatgccgaaaccagcaagatgaaagtcctggagtttttagccaaggttcattataccgtccctagtgccttcccagcctggtatgaagaagctttgcaagatgaggaagaaagagcacaagctagagctgcagccagggctcacactgcagccatggccagtgcacgtgccagggccatgaccagtgcacattctaagggcataaccaatgagcactccagggccatgaccaatgtgcattccagggccatagccagtgtgcgctccaaggccacgcagacaattcctcccacccctaataaagtctgagcccaactttttaaaaaaaaaaaaaaa

SEQ ID NO: 213011 - DNA, 600 bp, Canis familiaris
aactgtatacacagggatctggctgcaagaaactgcctggtaggtgaaaataacgttctgaaaatcagtgactttggaatgtctcgtcaagaggatggtggagtgtattcatcttctggcttaaagcagattcccattaaatggacagcaccagaagctcttaattatgggagatacagttctgagagcgacgtgtggagcttcggcatcctcctctgggagaccttcagcttaggagtgtgcccctaccccggaatgacaaatcagcaggcgacggagcaagtggaaagagggtaccgaatatcagccccccagcattgcccagaggacatttttaaaattatgatgaagtgttgggattataaacctgaaaaccgccccaagttcagtgaacttcagaaagagctcacggtcatcaagaagaaagtcacacagtgacggagcagtgccaaccgcctccgggacctgggcgtctggcagagtgacatcgttctccccgctaacaatgagtttataccacattacctgcaacagtcttctaaggtgatttttgttattaactgttttgttttgttttgtttttaagtatgtgccactcac

SEQ ID NO: 213012 - DNA, 1400 bp, Canis familiaris
gtttttgagagaacagcctgacttaaatttctacaatcttgatgttcaaaaagaaataaaagaaattatacagttctggctcacaaagggtgttgatggttttagtttcgatgctgttaaatttcttctagaagcagaacatctgagagatgaagctcaagtgaacaaggctcaaataccggacacggtcacacactactgggagctataccatgacttcaccaccacgcaagttggaatgcatgacattgtccggagtttccgccagacaatggaccagtacagcagggagcctgggagatacaggttcatggggactgaagcctatggagagagcattgacaggaccatgatgtactatggattgccttttattcaagaagcagactttcccttcaacgattatctcagtaagctaaatactccttctgggaacagtgtgtttgaggttatcacatcctggatggaaaacatgccagaaggaaaatggcctaactggatgatcggtggaccagacaatgcccggctaacttctcgttttggggaagaatatgtcaacatcatgaacatgcttgttttcacactccctggaactcccataacttactatggggaagaaataggaatgagaaatattttagtcacaaatttcaatgaaagctatgatgttaatactcttctctcaaagtcaccaatgcagtgggacaatagctcaaatgctggtttttctgaagccaatcacacctggttacccaccagttcagattaccatactgtgaatgttgatgtccaaaagactcagtccagatcagcattgaagttatatcaagaattaagtttgcttcatgccaatgacctgctcctcagcaggggctggttttgctatttgaggaatgacagccactctgttgtatatgcaagagagctggatggcatcgatagagtctttcttgtggttctgaattttggagaattatcactggtaaatctccaggaaatgatttccaacattcccgcaagaatgagaataaggttaagtactaattctgctgacgatcgcaatacagttgatacgaatgccattttactggataaaggagaaggcctcatccttgaatacaacacgaacgatctccttcatcaccaaacagctttcaaagacagatgttttgtttccaatcgggcatgctattccagtgtattaaacatactgcacagcttgtgttaggcacctctatgaaagagatgaagacactggcattctgttttattacaagcatttgcagtaacttcatgtatagcatgctgctgggtaaaaacagcttgaatgcaaaggttcccaaatgttttttaaaaataataaaattatcacttgcagaacttgaaaaaaaaaaaaaaaa

SEQ ID NO: 213013 - DNA, 600 bp, Canis familiaris
gaaataagcgcagatctatgtcccagaagtattcttggtcttctgaaggctggttaccttggagtcctgagagccagagatcccactggcagcaaagttcttatttacagaattgcacaatgggacccaaaagttttcacagcttatgatgtttttcgtgtaagtctaatcacatccgagcttattgtacaggaggtagaaacgcaacggaatggtatcaaggctgtctttgatctagaaggctggcagttttctcatgcttttcaaattaccccatctgtagccaagaagattgctgctgttcttacagattccttcccattaaaagttcgtggtatccatttgataaatgagccgataattttccatgctgtcttttccatgattaaaccattcctgactgaaaaaattaaggaacggattcacatgcatgggaacaattacaaacaaagcttacttcagcatttcccagacattcttcctctggaatatggtggagctgaattctccatggaggacatttgtcaggagtggacaaattttataatgaagtctgaaaattatctcagcagcatttcacagatcagcgaatgagaaaaa

SEQ ID NO: 213014 - DNA, 600 bp, Canis familiaris
tgaaggccctggtggaccggatcctgtcccagacagctgacgacctgcgcaggcagtgtgacatggtggacacggcattccagatggggctgaaggagaccaaggccgccagggaccagctggctgcccacctggccaaggtcatggaagagatcgcatgccaggagaagaacatgacggttctggagaaggccatccttgatcaagaggggcctgccaaggtggctcacacgcgcctggagacccgaacacgcaggcccaacgtagagctgtgccgcgatgtcgcacagtaccggctggtcaaggaagtcggagagattgcccagaatgtcggaaggctgaaggaggccctggcacaggcgcaggtggagctgaagggcctgaaccgccggcaactggcgctgcaggaggaagtccaggtcaaggagaacaccatctacatcgaccgagtgctctgcacccacatgaggaagtccaatcccctgcgggatgggggcgaccaaggccagtgggccagggcctgcgccccgacaccatctgctgaggatggcacttcacacactgattaaaccctggtcaccgtcaaaaaaaaaaaaaaaa

SEQ ID NO: 213015 - DNA, 600 bp, Canis familiaris
ctcagctgtgatggtagtgtggtctgctcaccagtgagctgccccaagttgccttgctgtacctgttgatgtctcctgacacataacaagaagcttcagagaagagggtcgagcaggcgtacaatgacatgaaaatcctcattctggacttttctgcacccagagcacctgaaagaaggaaaccagcaacagagcaacctgttctcttaaccatgttgagttaaatgagctggaaagcaggaggttctagaatgcagggtcctggttacctgagttctaaagcagttgtggatgtcaccaaggaagtgacgtcactttttcaagattccagcatctggggctcttctttcagtcagacctatccagaaccccttcttgcagatgactgcttacccctgtcgtctccttaactgcctcatcagccaacaaggccattgccataactctctgttaattccagtaaggtcctaacttttaggagacagagctgaatccagacctttagttttctgcttggcttctcagttctgtgttgtatctaactcacgatgtctgtcatataggtccctgtttcccaattagcacagtggtagaatcaga

SEQ ID NO: 213016 - DNA, 600 bp, Canis familiaris
caataaaaaaacagcccacaataataaagcgtcttttttccaccagtgtttgcgtgctgaccaaaccgattaaaatcagtaccagtgtaataattggaatttcaaaagtgaccccaaacaccaaaaagagttttaaacagaaacttaagtaactgttaatgtccgtcattggcgcaacggtatcaggtgaaacactgataaaaaaatgcagaatcgaaggcaaggcaataaaataggcaaaggcaattcctgaataaaacaagcaaatactgctcaataacaatgggaatgccagattcttttctttttcatacaacgcaggtttaataaatgcccaaatctgataaataatgaaaggcatcgccaacatcagcgcaataaagaaattcagtttaaaaggtgccataaatgttgcagttacatctgtagcaatcatggtcgaactggcaggtaattgggcacgtaatggttcagataacattgaataagttctgtttgcaaatggcagcaaacagaaaaaaagcacaatcaataccccgataattttaaacaaatstgacgcaacagcatcaaatgtcgggtgatcggcattgcttcaag

SEQ ID NO: 213017 - DNA, 600 bp, Canis familiaris
acagcgttccgagtggggaacgtccaggagctgtctgaattgagtgagcaagttctggaaactctgcacgatgcaatgcatgaaaccttatgtccgggtgtgaccgatatttccaaagtctgtaatctggatgtgattctggggtttgacggatcaagggatcagaatgtctttgtgacccagaagggccttgagtccaagatggatgccatcttgaatagaatcagccagatgcaaagaatcagctgcagcggcagccagatgcccaccgtgcgggtgtcggtggtggccaacacaccctcaggtcccgtggaagcctttgactttgccgagtaccagccagaactgtttgagaagttccggaacatgcgcaaccagcacccctatgtcctcactgcagacacactgaaggtctatcagaacaagttcagacagtcttcagcagacaatgtaaaggtggtcattcattttacggatggagtggatggaaatctggctgatttacaaaaggcatctgaggaactccgacaagaaggtgtccaggctcttatcctcgtgggccttgaacgtgtagccaacttggagcagctgatgcagttg

SEQ ID NO: 213018 - DNA, 116 bp, Canis familiaris
gtgagctgtcctgccagctataccagaggtcaggagacatggggctgggcgtgcccttcaacatcgccagctacgccctgctcacctacatgatcgcacacatcacaggcctgaag

SEQ ID NO: 213019 - DNA, 512 bp, Canis familiaris; identical to SEQ ID NO: 2912

SEQ ID NO: 213020 - DNA, 99 bp, Canis familiaris
ctttttcaagttgggtttctgagtcctgccacattcacggtgtacgaataccacaggccagataaacagtgcaccatgttctatagcccatccggttcc

SEQ ID NO: 213021 - DNA, 115 bp, Canis familiaris
atacacaaaattatctgatcctgccaattggctaaaaatagatcctgtgaacgggcaaataacaacaattgccgttttggacagagaatcaccaaatgtgaaaaacaacatatat

SEQ ID NO: 213022 - DNA, 203 bp, Canis familiaris
gaagagctatgagctgcccgatggccaagtcatcactattggcaacgagcgctttcgctgccctgagacactattccagccctcctttatcggtatggaatctgctggcatccatgaaacaacttataatagcatcatgaagtgtgacattgacatccgcaaggacctttatgccaacaacgtgctatccggaggtaccacca

SEQ ID NO: 213023 - DNA, 95 bp, Canis familiaris
attcttcgacacagtgccacatggctttgaaacccacactttacaggaacacaacttggctaattacctgttttttctgatgtatctcataaaat

SEQ ID NO: 213024 - DNA, 90 bp, Canis familiaris
gatttgacacagtcacaactgccatctcctggagcctcctgtacttggtgacaaaccccaatgtacagaaaaagatccagaaggagctgg

SEQ ID NO: 213025 - DNA, 57 bp, Canis familiaris
caccacaagagacacgagtctgagtggcttttacatccccaagggacgttgcgtctt

SEQ ID NO: 213026 - DNA, 218 bp, Canis familiaris; identical to SEQ ID NO: 2919

SEQ ID NO: 213027 - DNA, 600 bp, Canis familiaris
ttcatgatggtagtgatcagcctggaccgctccctggccatcacgaggcctctagctatgaaaaacaatggcaagctcggacagtccatgattggcctggcctggctcctcagtggtatctttgctggaccacagttgtacatcttcaggatgatccacttagcagatagctctggacagacagagggtttcccccaatgtgtaacacactgcagttttccacaatggtggcatcaagccttttataacttcttcaccttcagctgcctcttcatcatccctcttttcatcacgttaatctgcaatgcaaaaatcatatttactctgacacgagtccttcatcaggatccccatgaattacaactgaatcagtccaagaataatataccaagagctcggctgaggaccttgaaaatgacagttgcatttgccacttcgtttactgtgtgctggactccctactatgttctaggaatttggtactggtttgatcctgaaatgttaaacagggtgtcagatccagtaaatcacttcttctttctttttgctcttttaaatccatgctttgatccacttatatatggatatttctctctgtaa

SEQ ID NO: 213028 - DNA, 600 bp, Canis familiaris
ctttatggacgatggcggctttaacttacggcctggcatggagacctccatcagcatgaggaaggaagccctggacagacttggaggcaactatggtgactgcaccaagaatggcagcgaagtccctgtggagaacctctatcgttccaagtacacacagcaggtgtgtatccgctcctgcttccaggagaacatgatcaaacagtgtggctgtgcctacatcttctacccattgcccaagaatgcggagttctgtgactacaggaagcataattcctggggttactgttactataagctccaggatgccttttcctcagaccacctgggctgtttcaccaagtgcaggaaaccatgtagtgtggccagctaccagctctctgccggttattcacgatggccctcagtgacatcccaggactggatcttccagatgctatcccgacagaacaattacaccatcaacaacaaaagaaacggagtcgccaaactcaacatcttcttcaaggagctgaaatacaaaaccaattcggagtctccctctgtcacgatggtcaccctcctgtccaacctgggcagccagtggagcctgtggttcgg

SEQ ID NO: 213029 - DNA, 272 bp, Canis familiaris; identical to SEQ ID NO: 2922

SEQ ID NO: 213030 - DNA, 328 bp, Canis familiaris; identical to SEQ ID NO: 2923

SEQ ID NO: 213031 - DNA, 600 bp, Canis familiaris
agctggacacttatctcttgctcagcacagcttcactgtgcttaaatcagcactgacacagattgggcacttcgtacactcgtgctgctagtaaacccccactgaaacaagggacatagaatgtggtcccaggaggcaccaaatccctgaggtcccagcggctctgcttgttagaactgacgggtactcctgtttctcaaaatgcaaagcactagccttcagaatctgctcctgaccaactcaaaagccatcttgtcacaaagtatatgaacacacacacacacacacacacacacacccctacacccactcactctttctcaccactctggattactattttaggaatagctcctgtatttatatcgtagctcctgcagcttcttccagatgttgtcaccaaccatcggccaggtatgtttcatcagacacagagtattcaacacagaacatctcatacaattatctaaactttttaaaaaaagattttatttatttattcatgagagacacacagagagaggcagagacataggcagagggagaagcaggctccatgcagggaccctgatgcaggactcgatcccaggactccaggat

SEQ ID NO: 213032 - DNA, 296 bp, Canis familiaris; identical to SEQ ID NO: 2925

SEQ ID NO: 213033 - DNA, 1400 bp, Canis familiaris
ggcacacgtgtaaagaatttatacggttggaaacttataatcttcaccaggagaagaagaatgtttctggggcaatggactgccatgggccaccacgcgcccatgacccgctgtgggtactggctgtggaccagctggactcaaggcaaacctactttcttgccttccttgtgaattttgtaataattggagaaaatatatgtcagcacacacttacagagcacaattgcagtatataggtgctggatgtatgtaaaatatattcaaattatgtataaatatatattatatatttacaaggaattattttttgtattgattttaaatggatgtcccagtgcacctagaaaatcggtctctcttttgtttttaatagctatttgctaaatgctgttcttacacagaatttcttaattttcaccgagcaggggtggaaaagtacttttgctttcagggaaaaaaaaatggtataacgttaatttattaatgaattggtaatatacaaaacaattaatcatttatagtttttgttttgtttttattttgtaatttaagcggcatttctatgcaggcagcacatcggactagttaatctgttgcttggacttaactagttgtcagattctttgaaaagagaaatatttacagaatatgactaatttgggggaaaatgaagttttgatttatttgtttaaactctgctgtcagatgattgttcttctgccaccaaaatgccagtagtaaacaaacccatcgataggaaagtattttgttttgctgtgcagctctgtcattgggcccatggagcgcggaactggacttcccaagacaaatggtaccagcgttctcttaaaaagatgccttaatccattcctcgagggtggaccttagttgagatgatagcagactgtactcccctccggcagctggccttctgccctgagttgcacgttaatcagattagcctgtattctcttcagtggattttgataatggcttccagattcattggcgttagggaagccttttagaatcttcacgtgtcatcgtcgaaattgaaacactgagttgttctgctgatggttttggagatacttccatctttttaagggtttgcttctgtctaattctggcaggacctcaccaaaagatcgggcctcgtaccaacgtcagacacgatgtcgccgtgttgtgcgttctgtatttaaagtattgtgttttgcttcggaaacacctactcactttgctatagccatgcaacatgaacgcagattacactgattctacttgttacgaaattggagaaagtatttaataaaacctgttaatttttatactgacaataaaaatgtttctacagatattaatgttaacaagacaaaataaatgtcacgcagctt

SEQ ID NO: 213034 - DNA, 1325 bp, Canis familiaris; identical to SEQ ID NO: 2927

SEQ ID NO: 213035 - DNA, 500 bp, Canis familiaris; identical to SEQ ID NO: 2928

SEQ ID NO: 213036 - DNA, 320 bp, Canis familiaris; identical to SEQ ID NO: 2929

SEQ ID NO: 213037 - DNA, 600 bp, Canis familiaris
cgcccacctttcaggacctcctgaatcgcaccgtggccggccacccgacaggctggtataaggatctccgtcattactactaccgggagcgttgggagctttacgacaggagccaggacccccacgagacccggaacctggccgctgacccatactatgccccggttctggagctgcttcagacccaactggccaagtggcagtgggagacccatgacccctgggtgtgtgctcccgatggtgtcctggaagagaagctctccccccagtgccggccactccacaatgagctgtgacagttcctgggggcacgagggaggcctcctcaggcctggtccccaccttttcagctgctgtgggaggatgggccatagtggcccacctgaggagggctctccctgctgctggggtcattcctgccactgcctgggagggagagtggggcaggtaccccggccctccctccccccgtgctagaggacactgctgttcctgtgtccaagccatgtctcagcctaggaattccaggggggcctggagcagggtgggatccccagcccgtgacctgtgaggatggttgaggatggtctgggcaggggc

SEQ ID NO: 213038 - DNA, 176 bp, Canis familiaris; identical to SEQ ID NO: 2931

SEQ ID NO: 213039 - DNA, 577 bp, Canis familiaris; identical to SEQ ID NO: 2932

SEQ ID NO: 213040 - DNA, 1400 bp, Canis familiaris
gtgcagattgcctgcctggctctgggcaccactgagtaccaccccttcacactgacttctgcaccccatgaggacacactcagcctgcacatccgggcagcagggccttggaccactcgtctcagggagatctactcacctccaacaggagatggctgtgccaaatacccaaagctgtaccttgatggaccatttggagagggtcaccaggagtggcataagtttgaggtatcagtgctggtgggagggggcattggggtcaccccctttgcctccatcctcaaagacctggtcttcaagtcatcagtcagctgccaagtgttctgtaagaagatctacttcatctgggtgacacgaacccagcggcagtttgagtggctggctgacatcatccgggaggtagaggagaatgactgtcaggacctggtgtctgtgcacatctacatcacccagctggctgagaagtttgacctcaggaccaccatgttgtacatttgtgagcggcacttccagaaggtgctgaaccggagcctgttcacgggcctacgctccatcacccacttcggccgccctcccttcgagccattcttcaagtccctgcaggaggtccacccacaggtccggaagattggggtgtttagctgtggcccccctggcatgaccaagaatgtggaaaaggcctgtcagctcatcaataggcaggaccggactcacttctcccaccattatgagaacttctaggcctcctgtccaagggctcttcccactgtcccactgagcaggtctggacccgcaccttactctgtacttcctgtttctggcttcctcagccttctccccattcctagctcccaactttggtccgagtgaccatggtcagtcaccccatatgggttcagagacccccaagttcagactgtctcagcctggagaaatgggaggcactgtctgggaaatagcaggtaggagagctattattactttggggcaaagggacacctcttcttccaaactaagaaaaaccctcaaaagactggagctgacatgtgtcagctgtgtgcatgtgtacaggggactgtgagcctaagggtgaagtgggagcacagatgctggcattttggaacctctccccccaagcctcccccttctctaggctccccactgtcaaaagggctggcaaatgccttgggcggggcagaggctagacctgcagagagaaatttacaggaaccccttcagcctcctagtctaacagcacaattgatctcctctcccgggttcttaaacgtgtactgtagtcagaatctggcctgatatctctttgtagtgctctcaggccttctctccctactgcagtagtctcctttataaataaaccacttttctgccaaaaaaaaaaa

SEQ ID NO: 213041 - DNA, 1400 bp, Canis familiaris
taccgaagattggggtgttcagctgtggcccatccaggaatgaccaagaatgtagagaaggcctgtcagctcatcaacaggctggaccaggcccacttcggtgcaccacttatgagaacttctgagaacttcctggttcctgttttccctctgtggaccagccctaccagcagtttctttgtcagaatctttctcaggcctcagctgggaagctagaagagcccctccctcctggccccatctgtcctatgctctgagaaggtggagaagacccctctagctaaagtcacagcaggttatggcaaacaaaagtaggatggggacagtccctgccttgtaacatctgtagaggtgaagagatataatagtgtctgcctccgatcagtccccatatctctgctttccttgcacaaagttgatgtattgctttggtattggactcagcatttgagggctaagtgagaatctcctcagagcctagctcagaagccatgatgcttggaacctagaccgtcaaactgcctctgttcagtctctgaggtcttgtccttccaactccacccctgcccccttcttattcttaaagggtcaggaacactgaaaaataaccagagaacaaagatggctccctagtcctgatgtttctgcagtcaaccagcaatgcctgataccatgaccttttgatggatcctctctgagtctgtggggcagccccttggctctgagactaagggagtccagcctgtctgccagacacccaaaattccctctcagtttcctacttccacagaagccaggtgaccagctgtcccggtttgcccagggcactcccagttctaccactaagagtctcttatcctaggaaacatctgaatcccaggcaactcagacaaagttagtgacctcacacaggaggcagcctgggatgtcatctccatactcagctctttaagacactttcttttccttctgcaactgaccctttcctaaaaatctgagctttaatttttttaaatttaagtataatttgcatgcagcaaagtgtgcaaatcgtaaagttacatgtccatgtgtcaacattacctaagtcacgatatagagcatttccaacagtctcccccaaccagtagaagcaaccactgatgtgatttctgtcaccctggattaggtttggccatactgaatgtattctttggaaactggcttctttcactcagcacaatatctttgtgattcatccatgttgttgtgtgtatcagtggtatattcattttcattgccaaattgtattccattatagaaatgtaccaaagtgtttatccattcttctgttgatggacatttgggttgtttctagtttttggtaattctgaataaagcttcaatgaacaaaaaaaaaa

SEQ ID NO: 213042 - DNA, 600 bp, Canis familiaris
cagattatgatgtgttccatgtatggcatatgcaaagtgaagaatatagaccttaaattcaaaatcattgtaacagcatataaggatcttcctcatgctgttcaggagacattcaaacgtgttttgatcagagaagaggagtatgattccattatagtattctataattcggtcttcatgcagagactgaaaacaaatattttacagtatgcttctaccaggccccctaccttgtcaccaatacctcacattcctcgaagcccttacaagttttctagttcacctttgcggattcctggagggaacatctacatatcacccctgaagaatccatataaaatttcagaaggtgtgccaacgccaacaaaaatgactccaagatcaagaatcttagtgtcaattggtgaatcatttgggacttctgagaagttccagaaaataaatcagatggtgtgtaacagcgaccgtgtgctcaaaagaagtgctgaaggcagcaaccctcctaaaccattgaaaaaactacgctttgatatcgaaggtacagatgaagcagatggaagtaaacatctcccaggggagtctaaatttcaacagaaactg

SEQ ID NO: 213043 - DNA, 534 bp, Canis familiaris; identical to SEQ ID NO: 2936

SEQ ID NO: 213044 - DNA, 243 bp, Canis familiaris
gtcatgatgatgggcagcgcccgagtggcggagctgctgctgctccacggcgcggagcccaactgtgccgaccccgtcaccctcacccgccctgtgcacgacgcggcccgggagggcttcctggacacgctggtggtgctgcaccgggccggggcgcggctggacgtgcgcgatgcctggggccgtctgcccgtggacctggctgaggagctgggccatcgcgatgtcgcacggtacctcgcg

SEQ ID NO: 213045 - DNA, 1400 bp, Canis familiaris
ccgtgggggaggacgagagccggctgttcaccaaaatccgaaatgagttccacaaatggagcgctgtgattgaaaagaagttccaaagaggttacaaagctatatataaacaaatggagaaatttgaaaatcggtatcgtggcagagagctgccaggatttgtaaattacaagacgttcgaaattattataaaacaacaaatcaaagaactggaagagccagctgttgatatgctgcacacgataactgatatggtccaggttgccttcggagatatttcaaaagcaaattttgatgaatttttcaacctctacagaactaccaagtccaaaatcgaagacattaaattcgagctagagaaagaagctgagaagtccatccgacttcacttccaaatggagcagatcgtctactgccaggaccacgtctatcagcgggccctgcagagggtcagggagaaggattcggacgaggagaagaagaagaagaccagcagcatgagccatgacgaggtttcttccgtcaacatctccttgtctgaaatcttggagcacctgttggcctaccgccaggaggccaccaaccgcatctccagccacatccccttgatcatccagtacttcatcctgcaagtgtacggccagaagctgcagaacggcatgctgcagctgctccaggacaaggacacctacagctggctcctgaaggagcgcagtgacaccagcgacaagaggaagttcctgaaggagcggctggcgcggctggcccaggctcggcgccgcttagccaaattccctggttaaggccggctccctgtcccgcctgcatctccagggcacgtctgcagggagcagcacccgccctctctccccaaacccacatcgcagatactcgaggagttagtagccagtcttcccggtcaccatccatgcttgtccctgagtgggcaaggacctcctaagaagacgcaggtcatgattaagatcgagacttagggattgagtcccacgtcgggctccctgcacggagcctgcttctctctctgccagtgtccctgcctctctctctgtgtctctcatgaataaataaatgaaaaaaatcttaaaaaaaaaaaaaaaaagaacgagattcagattgggggtggacgccgccgccctcctggttaggagaaatgattttctgccctcggggttgttccccttaaaccctctccatcttccaccaggggaccagtgcatgcaaagcattgtagaaggattagttcctgcttttgtgcaacttctttcatgcacctgttttgggagcattagcgccacgtgtgggtgctcttagaagctgtatttcactgatttgtaataaacttgtttatccccggaaaaaaaaaaaaaaaaaaaaaaaaa

SEQ ID NO: 213046 - DNA, 1400 bp, Canis familiaris
ctcaccatgctccggaagactattgaaattgtctggcaagctttcaccgacacagccaagaaacattttagcgtattttccaacctcagtcaaacaatccagaacaagattgaagacataaaaacgaggcaggcagaaaccgcagaaaatctgatccgacttcagttcagaatggagcagctggtttactgtcaagaccagatttacagcgtggttctgaggaaggtccggaaggaggttttcaacccagcgggaaaggctgcgcaggatcttcagttgaaatttcctttcccgaaagatctgccttcgatgtcatccaatgatgagatcggggtgcacctgaatgcgtatttcttggaaaccagcaaacgcctcgccaaccagatcccattcataattcagtattttgtgctccaagagaacggcagttgcttgcagaaagccatgatgcagatactacaggagagagagcagtactcctggctgcttcaggagcacgccgacacctctgccaagaggagattcctcaaggagaaaatttaccggctggctcaggcgcggcgcgcactctacatgttcttcagttaaagggggcaggtccatggaggggcagcaatgctttggggggggcggtttcttatgtgccttccctgtgaaggggacaagaagtggcttttcatgtggaaccaggctttcctgctctcgccggtgtccattttcattgtactgtgctcagcaccagagtttgtatctgaagtccgcactcacttggggctgtcacctctgacctccccgaagaggtggctctgagtccttgagccttctcaaatactgctctcattctttgttagattgtaggaccccagaggggtggggagtcaggatcctactgttctttggcatttccaggatcttgcatggcacctggtacacaggagccccttaataaatggtatctcgctgaacaaatgaatgatggagacgggcgctatggcttaaattcagactttggaggtatgaggcagtgtcacctgcttcccactgttgactgtcatcgtgtttccagcccccaggagaaatgagcctgagtgataccggttttaatgtgtaccgttcccctggctgcagggagctcccattgctatgttaagtcttgaagagacgtttaataaggaagaacattttttttttttaaatgggcacctggctgcagttggtgaagcatctatctttggctcaggtcatgatcctggggtcctgggatcgagtcctgcatcaagctccctgctcagtggggagtctgcttctccttctgcctgctgctccccctacttgtgctctctctctctctcaaataaataaaatcattaaaaaaaaacaaacaaataaaatgatgagct

SEQ ID NO: 213047 - DNA, 1400 bp, Canis familiaris
ttgacagattcctgggatgaatgcaagtcctgcctggagagtaactgcatgagatttcacacaacctgccaacctagttggtcctctatgaaaaatacggtcgaacagtttttcaggaatatatatcaatacctgtttccttttgatgaggataatgaaaaagatctccctgtcggtgaaaagttcattgaggaggatgcacaagtagctcaaatagagaatgtgttcaaccagctgactgtggatgtgagatttctctttaacagaagtcttaatgtcttcaaacagatgcagcaagaatttgaccagacttttcaatcatatttcatgtcagatacagacttaatgcagcctaactttcttccagctttatctaaagagccaaggaaaaaagcagatcctgtgcaaagttgggatattcccagcttcttccagctgttttataacttcagtctctctatttatcacagtatcagcacaacaatcaccaagacgctgaatgcaatagaggatttaccaaaacaagacaatgattctaaccatggaagcctgagttcaaagacattgcctgtgcagcacagaggaccgtatggagaatttggccagaatttgtcagaatgtttccagtttcatgccagatgccaaaaatgtcaggattacctgtgggaagactgtcccgatgtacctgaactacacacaaaagtagatgaggccctcgaattggtcaacatatcccatcagcaatatgcccaggttctccagatgacccagcaccacctggaggacaccacatatctgatggagaagatgagagaggaatttggctgggtggctgacctggcaaaccaggccccaggagctgagaacatctttgattccacaaagatggttccaaacatacatgaagggaatttttccaaacaagacgaaacgatgatagacttaagcattctgtcttcccctaacttcacactcaagatccctcttgaagaaagtgctgagacttctaacttcattagctacatgctggagaaagctgtgcagcattttaagaaacattttaaaacttggtaagacctgaggcatcctatacctgccaagtagaattacctcttcgggtacctctgagatctgaaaatcccaaatgtataagataatgtaataaatgaaatagcaggaaagtatgtcagttacatattatgaattactgttaattttcttatgttgaatggcagtttcatagctattggaattgagttaaagtaaaatccctttttaagaaaatcacatgtacacattactaaattctatggtaggttagtagttctatgtatattaaataaatataaaattaccaacgtgaaaaaaaaaaaaaaaaaaaaaaaaaaaaaaaaaaaaaa

SEQ ID NO: 213048 - DNA, 1302 bp, Canis familiaris; identical to SEQ ID NO: 2941

SEQ ID NO: 213049 - DNA, 600 bp, Canis familiaris
gcgtactcttccaatggtaaagtgaatgacaagcggttgtatccagagtcttcctataaatcaacaccggtccccgaagtggtgcaggagctgcccgccacctcccctgcggatgacttcaggcagcctcgctacagcagcagcgggcacttggagccaccttcgaagagggccccctcgaaaggaagaacgggaaggcccaagaggctggagcaggaccactatgagacagactacacgacgggcggcgagtcgtgtgacgagctggaggaggactggatcagggaatatccacctatcacttcagatcaacaaagacaactctacaagagaaattttgacactggcctgcaggaatacaagagcttacaagcagaacttgatgagatcaataaagaactctctcgcctggataaagaattggatgactatagagaagaaagtgaagagtacatggctgctgctgatgagtacaatagactgaagcaagttaagggatctccagattacaaaaataagaggaattattgcaagcagttgaagagcaaattgtcccacatcaagaagatggttggagactatgatagacagaaaacatag

SEQ ID NO: 213050 - DNA, 600 bp, Canis familiaris
cgctggatccgcacacagcagcactactacgagaagtgccccaagagggtttattacctctctttggaattttatatgggccgaacgttacagaacaccatgataaaccttggcctgcagaatgcctgtgacgaggccatttaccagcttgggttggatatggaggagttggaagaaattgaagaagatgctgggcttggcaatggtggtcttgggaggcttgccgcttgcttcttggattccatggcaaccctgggacttgcagcctatggatatggcatccgatacgaatatggaatcttcaatcagaagatccgagatggatggcagatagaagaggcagatgattggctcagacatggaaacccctgggagaaggcccggcctgagttcatgctgcccgtgcacttctatgggaaagtggagcacaccaacactgggaccaagtggatcgacacccaggtggtcctggccctgccatatgataccccggtgcctgggtatatgaataacaccgtcaataccatgcgcctctggtccgctcgggcgccaaacgactttaacctcagagactttaacgttggagactacattcaggct

SEQ ID NO: 213051 - DNA, 600 bp, Canis familiaris
gccaacgatatgctaatatttggatctttaactgcctggttcttaaaagaggtgacagatcatgcagatgggaaacatgtcattgcccaattccatgaatggcaggcaggaactgggctgatcctttctcgagctcggaaacttcccattgctacaatatttaccactcatgcaacactgcttgggaggtatctctgtgcagcaaacattgatttctacaaccatcttgataagtttaacatagacaaagaggctggggaaaggcagatttaccaccggtattgcatggagcgggcctctgtccattgtgctcatgtactcaccacagtatctgaaataactgcaatagaagcagaacatatgctaaagaggaagcctgatgtagttactccaaatggcttgagtgttaagaaattttcggcagtacatgagtttcaaaatctacatgccatgtacaaggccaggatccaagattttgttcgaggtcatttctacggtcatctggactttgatcttgaaaagactttgttccttttcattgctgggagatatgagttttcaaacaaaggtgctgacatcttcctagaatccttatccagg

SEQ ID NO: 213052 - DNA, 210 bp, Canis familiaris; identical to SEQ ID NO: 2945

SEQ ID NO: 213053 - DNA, 821 bp, Canis familiaris
atgagcagcttccccatcctgcaccttctcttgctcctgcttggatgccaagtcccacaggcacaggggaggcctttttcgacagacctgcctaagcaatacttcacaatgatcaatgaaattatggagatgttaaacaagtcaccctcgccttcagaagaacccttggactcaaatgagaaagagaccttgctggaagatacccttctgaggccaaacctggatgtattcttgaatgcttccagcaaattccacaaaaatggattgctaatctggaataatcttaaggaattcctgccactcctgcccactcccacacccaggggagaaccaatctctatcatggagaataattggggtgatttccaaaggaaattgaaaaaatatctggaagcccttgataactttctgaatttcaagaacaaaccctgagtcctagaattctcagtctgaggccttctcatcatggggccttggatgtcagatacagcagaacacctgaagactctgggatgtctctcatctctccagtccaggactggagggatttcattttctcctgtggagtcagatgaattgtccattatctaattactgaaacgtgctgcctccatttggcctttcatgactatattctcatttttatcctatttatttatttatgtatgtttttatttattaccatatgcaatgggaagtatatttattttagcaaaagagtctatgtcctgttccttctaaacaagactcaagagggggacatggggcttgttcatttgtacctcaggttttaaattgatttctacatctgagaaaataaa

SEQ ID NO: 213054 - DNA, 600 bp, Canis familiaris
acggcgctcattcaggcatcccaggacgcctctgtgacacacctcatgggcctctttgagccaggagacaccaaatatgatgtccaccgagacggaatccaggacccatccctgatggagatgacagaggcggccctgaggctgctgagcaggaaccccaagggcttctacctctttgtggaaggaggccgcatcgaccacggtcatcacgacggcacagcttacctggccctgacggaggccgtcatgttcgattccgccattgacaaggcgggccagctcacgagcgagagggacacactgaccctggtcaccgccgaccactcctacgtgttctccttcgggggctacaccctgcgagggagctccatcttcgggctggcccccagcatggccaaagacaacaagacctacacctccatcctgtatggcaacggccccggcttcgcgctcagcggggtcccccggcccaacgtctccgacgccgagagcagggaccccgcatacaagccgcaggccgcggtgcccctggactccgagacccacggcggcgaggacgtggcggtgttcgcgcgcggcccgcaggcgcacctggtgcac

SEQ ID NO: 213055 - DNA, 54 bp, Canis familiaris
ccgcagcccacctctcgggggcgggctcccggcgcgagcagggctttcgagaag

SEQ ID NO: 213056 - DNA, 600 bp, Canis familiaris
cggtggaccatggccctgatggaggagtttttcctacagggagataaagaagccgagttaggacttccattttctccactttgtgatcggaagtcaacgatggtggcccagtcacaaataggtttcattgatttcatagtagagccaacattttctcttctgacagactcgacagagaaaattattattcctcttatagaggaagcctcaaaaacagacacttcttcctatggggcaagcagacgatcaaatatgaaaggcaccatgaacgatggaacctattccccagactactcccttgcaagcgtggacctaaagagcttcaaaaacaacctggtggacatcatccagcagaacaaagagaggtggaaagagttggctgctcaaggtgaaccagatcttcataagaactcagaagatctagtaaacgctgaagaaaaacatgtggatacacattcataggtttgaaataccttacaggcttctgtcattttaaacatgagaggtaattttattttttagacaagaaacctaatttctgaagtgaatggttcgtagaatatcattagagacaaagctatctcattgcagtgtcctcct

SEQ ID NO: 213057 - DNA, 600 bp, Canis familiaris
accttctacactggtgttacagggcctgtcttcaaggagagcaagaaggaagtggtgctcgcgccaggggccacggaacgcgtgtccatgcctgtggcctacaaggaataccggccccaaatcgtagaccaggggtccatgctgctcaatgtctcaggccacgtcaaggagaatggacaggtgctggccaaacagcataccttccgtctgcgcaccccagatctctccctcacattattgggggcagctgtggttggccaggagtgcgaagtacagattgtcttcaagaaccccttgcctgtcaccctcaccaatgtcgtcttccggcttgagggctccgggctacagagacccaagatcctcaatgtgggggacattgggggcaacgagacagtgacactacaccagaagtttgtgcctgtgcggccaggcccccgccagctcatcgccagcttggacagcccacagctctcccaggtgcatggtgtcatccaggtggacgtggctccagcccctgggggtgggggcttcttttcaaatgctggaggcaatagtcccttgggggagaccatccctatggcatctcgaggtggggcttag

SEQ ID NO: 213058 - DNA, 503 bp, Canis familiaris; identical to SEQ ID NO: 2951

SEQ ID NO: 213059 - DNA, 600 bp, Canis familiaris
ggcggttccccgggccggggctccgcgcgcagagcccgcgcccacgatgtggagatggtgggccagctcgtgggcatcatggtggtgtcgtgcatctgctggagcccgctgctggtgttagtggtgctggctgtcgggggctggggctccagctccctgcagcggccgctgtttttggctgtgcgcctcgcttcatggaaccagatcctggacccctgggtgtacatcctgctgcgccaggcggtgctgcgccaactgcttcgcctcctgcccccgaggcccggcgccaagggcagcccggcggggctggccctaaccaggagcgcctgggaggccagctcgctgcgcagctccaggcacagcagcctcagccacctctaggcgagccaggagtcccagaggccaagtcagcccaccccgggcccaggaccgcagcgcggagccttcgggggaataaagccgttttgcggacctgcgcggggcctgtgtcgggtgggggccgcagcacccctgtgaccgcgcgggggcgacagatgcgccgcgtgagcctccggggtgtgcagttccaggactttccacgcggaagcgcggaagcgcgga

SEQ ID NO: 213060 - DNA, 600 bp, Canis familiaris
tccctgaggccgtgggttttgatatgataaccattgactacaaaggacgttacctgcgaatctgcttgcttcatcctacccagaaaacagccttcatgcagttttacaagacagctaaagattggtggctatttagtttctatttctgcttgccattggccatcactgcctttttttataccctgatgacctgtgaaatgttgagaaagaagagtggcatgcagattgctttaaatgaccacttaaagcagagacgggaagttgccaaaacagtcttttgcctggtccttgtctttgccctgtgctggcttccccttcacctcagcaggattttgaagctcactatttatgatcagaatgatcccaatagatgtgaacttttgagcttcttgttggtgttggattatatcggcatcaatatggcctccctgaattcctgcattaatcctatagctctgtatttggtgagcaaaagattcaaaaactgctttaagtcatgcttatgctgctggtgccagtcatttgaagaaaaacagtccttagaggaaaagcagtcatgcttaaagttcaaagctaatgatcacggatatgacaacttcc

SEQ ID NO: 213061 - DNA, 600 bp, Canis familiaris
  misc_feature (576)..(576): n is a, c, g, or t
gcccagctgctcaaatcccgaatcacttccgagggggagtacatccccctggatcaaatagatatcaacgttgggttcgacagcgggattgaccggatatttctggtgtcccccatcaccatagtccacgagatagatgaagacagtcctttatatgacttgagcaaacaggacatcgacaatgcagactttgaaatcgttgtcatactggagggcatggtggaggccacggccatgaccacccagtgccgtagctcctatctggcgaatgagatcctctggggccaccgctacgagcctgtcctcttcgaggagaagcactactacaaagtggactactcaaggttccacaagacctacgaagtgcccaacacgcccctctgtagtgccagagacttagccgaaaagaaatacatcctctcaaatgctaactccttttgctacgaaaacgaagttgccctcacaagcaaagaggaagatgacagtgaaaatggagttccagaaagcacgagtacggacacgccccctgacctagaccttcacaaccaggcaagcgtacctctagagcccaggccnttrmgrcgrgartcrgagatatga

SEQ ID NO: 213062 - DNA, 163 bp, Canis familiaris; identical to SEQ ID NO: 2955

SEQ ID NO: 213063 - DNA, 219 bp, Canis familiaris; identical to SEQ ID NO: 2956

SEQ ID NO: 213064 - DNA, 232 bp, Canis familiaris; identical to SEQ ID NO: 2957

SEQ ID NO: 213065 - DNA, 337 bp, Canis familiaris; identical to SEQ ID NO: 2958

SEQ ID NO: 213066 - DNA, 190 bp, Canis familiaris; identical to SEQ ID NO: 2959

SEQ ID NO: 213067 - DNA, 445 bp, Canis familiaris
atgaaccctccctctacaaaggtcccctgggccgccgtgactctgctgctgctcctcttgttgccgcccgcgctgctgtcgcccggggcggccgcgcagcccttgcccgactgctgccgccagaagacgtgctcctgccgcctctacgagctgctgcacggcgcgggcaaccacgcggccggcatcctcacgctgggcaagcggcggcccggacccccgggcctccagggccggctgcagcgcctcctgcaggccagcggcaaccatgcggccggcatcctgaccatgggccgccgcgcaggcgcagagccagcgccgcgcccctgtcccgggcgcagatgtcccgtggtggccgtcccctctgcagcgcctggagggcggtcgggagtctgagctgacgctcgcgccgcgtcctggccctgccctctcctcgctgcccgccgga

SEQ ID NO: 213068 - DNA, 600 bp, Canis familiaris
ctaccaccaggactccgaggccgccatcaaccgccagatcaacctggagctctacgcgtcttacgtctacttgtccatgtcttattactttgatcgcgatgatgtggctttgaagaactttgccaaatattttctccaccaatctcatgaggagagggaacatgctgagaaactgatgaagctgcagaaccaacgaggtggtcgaatcttccttcaggatattaagaaaccagaccgtgacgattgggagaatgggctgaatgcaatggagtgtgcattacacttggaaaagagcgtgaatcagtcactactggaactgcacaaactggccactgataaaaatgacccccacttgtgtgacttcattgagactcattacctgaacgagcaggtgaaatccatcaaagaattgggtgaccatgtaaccaacctgcgcaagatgggggctcccgaatctggcatggcagagtatctctttgacaagcacaccctgggaaacagtgataatgagagctaaccttagctgcttccataccgcagggtgacttcctggcaccgagcatgcatgcatgttggggtatcctttaccttttctataaa

SEQ ID NO: 213069 - DNA, 518 bp, Canis familiaris
atgccgaagcacgagttctccgtggacatgacctgtgaaggatgctctaacgcggtcagtcgggtgctcaacaagctgggagcatgactttggccctttataggaagaatgtgctgatatctggcatggaggaaaggggaaggtggttgtgaataagaattctggagccagcattctttcttgccccaactgggagggtctctgcttcctccccacacaccctacttccttttcctgcaggagttgagtttgacattgacctgcccaacaagaaggtctgcatcaactctgagcacagcgtggacattctgctggagaccctggagaaaacaggaaaggccgtttcctacctcggccccaagtagtgagggcctggaccctgagcccatgatggaccaaagggagcaggtgggtgaggccccagcccttggacagaatatttcattagctaatgcaaatcatgagttcagggaatcctcacagccccctgagaatacgcagagcactgtgttatgtct

SEQ ID NO: 213070 - DNA, 395 bp, Canis familiaris; identical to SEQ ID NO: 2963

SEQ ID NO: 213071 - DNA, 416 bp, Canis familiaris; identical to SEQ ID NO: 2964

SEQ ID NO: 213072 - DNA, 396 bp, Canis familiaris; identical to SEQ ID NO: 2965

SEQ ID NO: 213073 - DNA, 397 bp, Canis familiaris; identical to SEQ ID NO: 2966

SEQ ID NO: 213074 - DNA, 340 bp, Canis familiaris; identical to SEQ ID NO: 2967

SEQ ID NO: 213075 - DNA, 1400 bp, Canis familiaris
agtgttcttagagattttaaagtgttcttttatttgcattggctaaagtacaattttccctaattcttaattcagtgtaagtgtttagagactttaaaatatatgcatgttagagctatgatagggtaaaagttacttatcagggatctttgtttatgaagggactctaatgttatatctgtagtaaattcattttaaaaggggcaaatgctgtccccagtattacgtgaatcagtgtaaagttgtgaatgtttttactatagttgcttttaaaaacatgaatagtggggcacctgggtggctcagtcagttaagtatctgactcttgacctcagctcaggtcttagtctcagggtcatgagttcaagctcttcattgggctccatgctggatgtggagcctactttaaaaaaaataaaaatatgagtagtatcaggaaagtagaacctgcatggcatatatttgtacactgtcagctattttttcagaggtatgtggttttccatgatgaaaaacttccgtgaggccatttatgtattatgtaaacataaatgcaaaccagttaaggtacacttttatgaatatctttgttgaaaaaaacatatagaaatatggatgtactttgcattcttacaaagatgcttgtcaggtgcaatgtgtcaatatataattcttgaatattacataaaattttaaattcatggtaggaactcactgtgtaaaagatttgcccagtggatttttttaaaaagtgaagacttttaatatttattccctaattgagttattttgtttattaggatgttcatgaagaaaggaaagtctgtatgagtgtttatatttatgtataaaggagtttaaaattcctaaggaatctccaagattcaactgatcattgacagtgagaaattcttggcccgtccatcaccagaacttcttgctccatcttgcaaatgatgtgagaatcaaaactgtcccacactttcactaatttagcatgtattgaaaaataaaagtttcagattaagtgctggctgcatgttggcaaaggcaaagcaaaagtaaacagaagaggctaaggtcagaacgtcagagattttgacagggcaaaagaactctgggaaataaagctacctatggaataggtacctatggaatacctatgtatcattttctctgaaattgctcaaatattgtaaatatgaatatttgtatatactgcaatggaaatattgtctggaatgtaagtgtggtctgtgtttgggtttgataaagtattttaaattatgattttaaaatattttatagcttttaaagtatgtatttatttaggcttatgccatacctattttgtatttgacatggcagtgcaaagtttgataataaaaatgtttgtattt

SEQ ID NO: 213076 - DNA, 443 bp, Canis familiaris
aaacgatggtgctactggtgctgctgggccccctggtcccactggccccgctggtcctcctggcttccccggtgctgttggtgctaagggtgaagctggtccccaaggagcccgtggctctgaaggtccccagggcgtgcgtggtgagcccggcccccctggccctgctggtgctgccggccctgccggaaaccccggtgctgatggacagcctggtgctaaaggtgctaacggcgctcctggcattgctggtgctcccggcttccccggtgcccgaggcccctctggaccccagggccccagcggtcctcctggtcccaagggtaacagcggtgaacctggtgctcccggaaacaaaggagacactggtgccaagggagagcccggccccactggtattcaaggtccccctggccctgctggggaagaaggaaagcgaggag

SEQ ID NO: 213077 - DNA, 207 bp, Canis familiaris
tggtgaacctggtcaaactggtccagcgggtgctcgtggtccacctgggcctcctggcaaggctggtgaggatggtcaccctggaaaacctggacgacccggtgagagaggagttgttggaccacagggtgctcgtggtttccctgggactcctggacttcctggcttcaagggcattaggggacacaatggtctggatggattgaa

SEQ ID NO: 213078 - DNA, 220 bp, Canis familiaris
agtcatcattacccaagagcaaagagatactgtgcccatccccaaaacaggcctcagccaactaggtcgctggatgtcagaggaggactttgagaaagctttcaatgcccgatttccagggtgcatgaaaggtcgcaccatgtacgtcatcccattcagcatggggcccctgggctcgcctctgtcaaagatcggcatcgagctgacggattcgccctat

SEQ ID NO: 213079 - DNA, 600 bp, Canis familiaris
caccatggattcaaagagatataaatttgttcccacatccctgaggctatagtgaaaaaaaatttttttctgtacattgtaaccttctttacatattaaatgtttaccacaatttcccatttccaggtagagtcttaattaaaagtagcattactgtgtgttggaagatggggagagatttttcttcattttgtgtatctttcatatgtgtgtacacattcactgttctttcagatttccattgtttgatacttttctgtctagacatttgtgattgtaatgctaatgcaaaggcagcacttcaaaggtcttctggtgcttcatgaataaaattgagtttttttatttgtcatattgatagaccagctgggaggttggactgatcattccagagagtcacagctttctttgctaccataaacattttggaactacatctgccatgtgacttgaaaaacatggttaagtgaatgaataaaatactcagtaactggtgtgtgatgacaaaatatttctacattgttttctgtggagaggtcagtttaacagcttaagcatttactggaatatgtctttttttcctaattactcacatttgtc

SEQ ID NO: 213080 - DNA, 600 bp, Canis familiaris
ccatagcctcattcccagtagggctaatgactttccatttagcacgatgagaattgttggccaaaacacattcatcatctttgtaaatggttatctggtttcaaatgaagaaaagaataaccaaatgaggtcactgttgactaatcctttactaatcccaatcttgggactttttgtttttttgaggtagaaaactttaccactggtcagcaatatgacctcatttttaaaaggtaagaataatgccaaaaattggtctatttctagaatacctcaatttgtctgtagtcacagatagctttgatcggaatagaagttttgagtgtacagtcaggattccttggcttcagctgaattattgtttttgctctccccatcaggcttgctattgtgcttttatactgcaaaagttcttctttctcttcctaagtaataaataagacagatttttaaaaattaaaagacttgtactctttcttcttttagggctttacacaagtaaaatttcatcataaaagttttccctgaccacttggtctaaatattcaatccctctctgcccctcttacatctctctttccttgttttggtcggctggtt

SEQ ID NO: 213081 - DNA, 600 bp, Canis familiaris
gaagctggcgctggatgtggaaatagccacctacaggaagctgctggagggcgaagagtgcaggatgtctggagaatgtcatgagtgctcggtggtcagcaatgtcaccagcacaagcagtggctctggtggaagccgtggagggttcagtggtggcagcagcggtggctacagaggcggcagtaccagcagaggcagcagtggaggctacggaggagtccgcggtagcagcagtggaggctaccagagcggcagcagcgggggctaccagagcggcagcagcgggggctaccagagcggcagcagcgggggctaccagagtggcagcagcgggaacaggctcagcagcggaggaagcagctctgtgagccagagtggaattggctccagctctggtggcatccagacctcaggaggcagcagctataagtctggcagtggaggcagcaccaacatccgcttctctcagaccaccagctccagccagcactgctccaagtgatcctctggggttaagcgtccatgcccacctgcatycctctcggcctgcccacagcacttcccactctgcctggcatcaaaaaatgccaacctccacct

SEQ ID NO: 213082 - DNA, 1400 bp, Canis familiaris
cccaatggcaaaacccggacctctctcaagaccatgagccgcaggaagctctcccagcagaaggagaagaaagccactcagatgctcgccattgttctcggcgtgttcatcatctgctggctgcccttcttcatcacccacatcctgaacatacactgtgagtgcaacatcccgcccgtcctgtacagcgccttcacgtggctgggctatgtcaacagcgccgtgaaccccatcatctacacgaccttcaacattgagttccgcaaggccttcctgaagatcctgcactgctgatgacctgctgcccacctgcacagcagcctgcttcccgcctccccgcccaggccggccgggtctcagctccggggagccgtggacaggggagggggcgcagggcggaccaggccttctctttgccccggcgggtcctgcagtgttagcttggctctgcgcccctccgtgctcgcacaccctcatctgccggggtagtgctagggagccaggcacgctgccggccctcgggccggacccctggctcaggggcagctcacagagcgccccccccacctctgggccctccctccttggcaccaaagacgcagccgccttctccgacctttctgtggggttctggggttgccggggtcagaggtggggctcagagaccgtgctttctggtaggtttggcttggtcttcacaggccgatgccggggcgggcggtgggtggggatggacagttcacaccccacgaggcccatgcccggggaagccagagctcttgccaaggccccaggcagcttcagtcctgggagacccatgtaaataccagacccacaggctgaaccccagagaagcccaagccaaaaatcttcacttgctccctgtcctgccccccaggagcctctatttccacagcagtgggtcccgccccggcccacctcgctccagcacccacgtgctttccatacctgccgaccgcagggactctggtcttgaagggcccccggaaggtctgtggggagaggagccacccccaaacccaccctgctgtctcccgacagactctgcatcccttctcgtagcaattgttgggcctgcctgggagcgggcagggacagcaggcttgcgaccacatctggggcctgggtcggggtactggagggcctctgggggctgcctcctgccacaaaaccactctctctccccctttgcctcctctctctccrgtcccctttcccttccactgtctccgccttagatgagccctcggccaagggagctgctgaccgccactcggcctgagggaggaggggaggctgcagcttcggggagcccctgggccccagactctgtaacatcactacacaygctccgaactaataaaactctgacaagagtc

SEQ ID NO: 213083 - DNA, 600 bp, Canis familiaris
actcaccctgaggacatgaaactctgcaccgttatcatgaagtccaatgggagtttcccagtgaacaggcggagagtggaggctgcccgccgagcccaggaactggagatggagatgctgtccagcaccagcccccccgagaggacccggtacagtcccataccacccagccaccaccagctgaccctccccgacccgtcccaccacggcctccacagcactgccgacagccccgccaaaccagagaagaatgggcatgccaaagaccaccccaagattgccaagatctttgagatccagtccatgcccaatggcaaaacccggacctctctcaagaccatgagccgcaggaagctctcccagcagaaggagaagaaagccactcagatgctcgccattgttctcggcgtgttcatcatctgctggctgcccttcttcatcacccacatcctgaacatacactgtgagtgcaacatcccgcccgtcctgtacagcgccttcacgtggctgggctatgtcaacagcgccgtgaaccccatcatctacacgaccttcaacattgagttccgcaaggccttcctgaagatcctgcactgctga

SEQ ID NO: 213084 - DNA, 600 bp, Canis familiaris
ctccgcaggcgccgcaagcgggtcaacacgaagcgtagcagccgggctttcagggccaacctgaaggccccactcaaggaggctgcccgccgagcccaggaactggagatggagatgctgtccagcaccagcccccccgagaggacccggtacagtcccataccacccagccaccaccagctgaccctccccgacccgtcccaccacggcctccacagcactgccgacagccccgccaaaccagagaagaatgggcatgccaaagaccaccccaagattgccaagatctttgagatccagtccatgcccaatggcaaaacccggacctctctcaagaccatgagccgcaggaagctctcccagcagaaggagaagaaagccactcagatgctcgccattgttctcggcgtgttcatcatctgctggctgcccttcttcatcacccacatcctgaacatacactgtgagtgcaacatcccgcccgtcctgtacagcgccttcacgtggctgggctatgtcaacagcgccgtgaaccccatcatctacacgaccttcaacattgagttccgcaaggccttcctgaagatcctgcactgctga

SEQ ID NO: 213085 - DNA, 317 bp, Canis familiaris; identical to SEQ ID NO: 2978

SEQ ID NO: 213086 - DNA, 1400 bp, Canis familiaris
ttccattctttggacatgctcacctgggaacaggtgacccgtacacgcctggattcccgtcattcaatcacactcagtttccaccgtctcagtcgtcaggattgcccagcatacctgtccaaacaatttccagagctgctgcagaaaagttgtttgaaaatatggaaggagactgtccttctgcctgggaaatagacccctcgtgtaggctggaaacgtcctcaaacaagaatgtgaatctcactgtgaacaatgtgctgaaagagataagaatttttaacgtttttggagttattaaaggttttgaagaacctgatcgctatgttgtaataggggctcagagggatgcctggggtcctggagctgcaaagtctagcgtaggaacagctctcctattggaacttgcccggatattctctgatatggtcttaaaaggtggctttaaacccagcagaagcattgtctttgccagctggagtgctggagactttggagcaattggtgccactgaatggctagagggatacctttcttccttgcatttaaaggctttcacttacattaatctggataaagctattcttggtaccagcaacttcaaggtttctgcaagcccactgttatattcacttcttgagaaaacgatgaaagatgtgaaacatccaattactgggcagtctctttatcgggacagcaactggatcaacaaagtcgagaaattgtctttggataatgctgctttccctttccttgcgtattctggaatcccagcagtttctttctgtttttgtgaggacacagattatccttacttgggtactaccatggatctctatgagaacctgaatcagaaaattcctcagttgaacaaaatggcacgtggagcagcagaagtagctggtcagcttataatgaaacttacctatgatcttgaattgaacctgaactacgagatgtataatgacagaatactttcatttgtgagggatatgaaccaattcaggacagacataaaggagatgggtctgaacctacagtggctgtattctgctcgtggagactttttccgagccacctccagactaacgacagattataagaacgcagagagaacaaacagatttgttatgagggagatcaatgaccgtatcatgaaagtggaacataacttcctgtcaccctatgtatctccaagagattctcctttccgtcatatcttctggggttctggctctcacactctgccagctttagtggagcatttgaagctgcgtcagaaaaataagagtgcttttaatgaaacactgttgagaaatcagttggctctagcaacttggaccattcaaggagctgcaaatgccctctctggtgacatatgggatattgacaatgagttttaa

SEQ ID NO: 213087 - DNA, 600 bp, Canis familiaris
gaggagaagcagagcaagctgcgcagcctgcgcaaccgccagagcctcttccaggaggaggggatgctctccctggtcctgaactgtattgaccgcctaaatgtctacacaactgctgcccactttgcggaatttgcaggggaggaggcagccgagtcctggaaagagattgtgaacctgctctatgaactcctggcctccctgatccgtggcaatcgtagcaattgtgccctcttctccaccaacctggactggctggtcagcaagctggataggctagaggcctcttctgggatcctggaggtgctgtactgtgtcctgattgagagtcctgaggtgctgaacatcatccaagagaaccacatcaagtccatcatctccctcctggacaagcacgggaggaaccacaaggtgctggacgtgctgtgttccctgtgtgtgtgcaatggtgtggccgtgcgctccaaccaagatctcattactgagaacttgctccctggccgtgagcttctgctgcaaacaaacctcatcaactatgtcaccagcatccgccccaacatctttgtgggccgagcagagggctccacgcaatacggcaaa

SEQ ID NO: 213088 - DNA, 600 bp, Canis familiaris
tcatgtccttctatgccgccttgattgacctgctaggacgctgtgcaccagagatgcatctaatccaagctggcaagggagaggcactgcggatccgcgccatcctgcgctccctcgtgcccctggatgaccttgtgggcatcatcagcctcccactgcagatccccaccctgggcaaagatggggttctggtacagccaaagatgtcagcatctttcgtgccggaccacaaggcatccatggtgctcttcctggaccgagtgtatggcattgagaaccaagacttcttgctgcatgtgctggacgtggggttcctgcctgacatgcggcggccgctttcgttggacacggccacgttcagcaccacggagatggcgctggcgctgaaccgctacctgtgcctggcggtgctgccgctcatcaccaagtgcgcgccgctcttcgcggggaccgagcaccgcgccatcatggtggactccatgcttcacacggtgtaccgcctgtcccgcggccgctcgctcaccaaggcgcagcgcgacgtcatcgaggactgtctcatggcgctctgcaggtacatccgcccgtccatgctgcagcacc

SEQ ID NO: 213089 - DNA, 153 bp, Canis familiaris; identical to SEQ ID NO: 2982

SEQ ID NO: 213090 - DNA, 320 bp, Canis familiaris; identical to SEQ ID NO: 2983

SEQ ID NO: 213091 - DNA, 1123 bp, Canis familiaris; identical to SEQ ID NO: 2984

SEQ ID NO: 213092 - DNA, 522 bp, Canis familiaris; identical to SEQ ID NO: 2985

SEQ ID NO: 213093 - DNA, 579 bp, Canis familiaris; identical to SEQ ID NO: 2986

SEQ ID NO: 213094 - DNA, 456 bp, Canis familiaris; identical to SEQ ID NO: 2987

SEQ ID NO: 213095 - DNA, 600 bp, Canis familiaris
cggcaagaaaactgatcagtgattttgccattatcttgcccaccctcatcttttgtgaaatagatgctctggtaggtgtgaatactccaaaactaattgtgccaagcgagttcaagccaacaagtccaaaccgaggctggttcgtcccaccatttggaggaaacccctggtgggtgtaccttgcagctgctatccctgccttgttggtcactattctgatttttatggaccagcaaatcacagctgtgatcgtaaacaggaaagaacataaactcaagaaaggagctggatatcacctggatctcttttgggtggccatcctcatggtggtgtgctcttttatggctcttccgtggtatgtggctgctactgtcatttccattgctcacatcgacagtttgaagatggagacagagacttctgcccctggagaacaaccaaagtttctaggagtaagggaacagagagtcactggaaccctcgtgtttatcctgactggtctgtcggtctttatggctcccatcttgaagtttatccccatgcctgtactctatggcgtgttcctgtatatgggggtagcgtcccttaacggtgtacagg

SEQ ID NO: 213096 - DNA, 416 bp, Canis familiaris; identical to SEQ ID NO: 2989

SEQ ID NO: 213097 - DNA, 600 bp, Canis familiaris
gaataccgaccccacgttctatataaccatgttgctcgccactcaagtcatcgttgcaggtgccatcataatccttctgctttatctcaaaaggctcaagatcattatattccctccaattcctgatcctggcaagatttttaaagaaatgtttggagaccagaatgatgatacgctgcactggaggaagtacgacatctatgagaagcaaacaaaagaagaaacggactcagtagtgctgattgaaaacctgaagaaagcctctcagtaatggggataacttattttagccttcagcatgaccttgtaaagattcatccccacgttctcgggaagcttcaaggtcaagcatcttgggaaaggacattacagtttctacagcatggtgtacctgggcatctccgactacttcttcaacacagcagggcttgtgtaccaagaggcaggggccttaaacatgaccatcacggacgacatgataccaaagaaatccaaattccgactgacaaccgattttttggggaccctcataccccaagtggccgagatgttccccaacatgacggttcaattcaacgtctgggcctcctccccgccgca

SEQ ID NO: 213098 - DNA, 1400 bp, Canis familiaris
  misc_feature (1384)..(1384): n is a, c, g, or t
gattctaattaatgtctccaaactggagaagagaaaaaaaagaggacctgtgataattgcctatgataattcatttcttgagaaaccatattattgagtggaaacttcaaagtattgaatcttggaggaatggctttcattcatttggatgtcggattcctctataccctgcttgtttgcacagcatttggctctatgctttcaaatgctgagataaaagttaatcctcctcaggattttgagatagtggaccctggatatttaggttatctctctttgcaatggcaacctccattatttccggataattttaaggaatgcacaatagaatatgaattaaaataccgaaacattgatagtgaaaactggaagaccatcattaccaagaatctacattacaaagatgggtttgatcttaacaaaggtattgaagcaaagataaacacacttctgccagcacaatgcacaaatggatcagaagttagaagttcatgggcagaaactacttattggacatcaccacaaggaaatcgggaaactaaaattcaagatatggactgtgtatattacaactggcaatatttagtctgctcttggaaacctggcatgggtgtccattttgataccaattaccagttgttttactggtatgagggcttggaccattcagcagagtgtactgattacatcaaggttaatggaaaaaatatgggatgcaggtttccctatttggagtcatcagactataaagatttctacatctgtgttaatgggtcatcagaatcccagcctatcagacccagctattttatttttcagcttcaaaatatagttaaacctatgccaccagactaccttagtcttactgtgaagaattcagaggaaattaacctgaaatggaacatgcctaaaggacccattccagccaaatgtttcatttatgaaattgaattcacagaggatggtactacttgggtgactaccacagttgagaatgagatacaaatcacaagaacatcaaatgaaagccaaaaattatgctttttggtaagaagtaaagtgaatatttattgctcagatgatggaatctggagtgagtggagtgatgaacaatgctggaaaggtgacatatggaaggaaaccttagtatttttcttgataccatttgcttttgtctcaatatttgttttggtaataacttgcctgcttttgtataagcaaagggctttactgaaaacgatctttcatacaaaaaaagaagtcttttctcatcaagacacattctgttgactcagtaactttcagtcttatggccagatgttaaatatgagtcttattaaactgaagcttttcctcaaatattgaataaatcttattttaaaangaaaaaaaaaaaaaaa

SEQ ID NO: 213099 - DNA, 146 bp, Canis familiaris; identical to SEQ ID NO: 2992

SEQ ID NO: 213100 - DNA, 151 bp, Canis familiaris; identical to SEQ ID NO: 2993
  misc_feature (119)..(119): n is a, c, g, or t

SEQ ID NO: 213101 - DNA, 600 bp, Canis familiaris
ttgaagaagatcctgaaatttccttagctgactattggaagtgtacctcatgcaatgaaatgaatcctcctcttccacctcattgcaatagatgttgggcccttcgtgagaattggcttcctgaagataaagggaaaatccctgagaaagccacaccagaaaactcaacacaagtagaagagggctttgatgtccctgattgtaaaaaagctgcagccagtgattccagagaatcatgtgctgaggaaattgatgataaaatcacacaagcctcccactcccaagaaagtgaggactattctcagccatcaacttctaacagcatcatttatagcagccaagaagatgtcaaagaatttgagagagaagaaacacaagacaaagaagaaattgtggaatctagttttccccttaatgccattgaaccttgtgtgatttgccaaggtcgacctaaaaacggttgcattgttcatggcaaaacaggacatcttatggcatgcttcacgtgtgcaaagaagctaaagaaaaggaataagccctgtccagtatgtagacaaccaattcaaatgattgtgctaacttatttcccctagttgacct

SEQ ID NO: 213102 - DNA, 600 bp, Canis familiaris
gctgcgggcacctgtgattcgcggaagtcctgccgcctcgcgccgcctcgcgcccggctctcgacccccgcccgccatgggccctcggtacggcggcgcccccgcgctcctgctcccgctgctgctgctgctgcaggtctcatcggggctctgccaagagccggagccctgccgccctggctttggcgctgacagctacacgttcaccgtgccccggcgacacttggagagaggccgtgtcctgggcagggtgagttttgaaggatgcaccggtctacctaggacagcctatgtttctgatgacacccgattcaaagtgggcacagatggtgtgattacagtcaagcggcctctacaacttcataaaccagagataagttttcttgtccatgcctgggactccagccgcaggaagctctccaccagagttaggctgaaggcagcgacgcaccaccaccaccaccatcatgatgctccctctaaaacccagacagaggtgctcacatttcccagttcccagcatggactcagaagacagaagagagactgggttatccctcctatcagctgcccggaaaacgagaaaggcccatttcctaa

SEQ ID NO: 213103 - DNA, 442 bp, Canis familiaris
atgagaatgcttctgaatttgagtttgctagctcttggggctgcctatgtttctgcctttgctgtagaaaatcccatgaatagactggtggcagagaccttgacactgctctccactcatcgaacttggctgataggcgatgggaacctgatgattcctactcctgaaaataaaaatcaccaactgtgcattaaagaagtttttcagggtatagacacattgaagaaccaaactgcccacggggaggctgtggataaactattccaaaacttgtctttaataaaagaacacatagagcgccaaaaaaaaaggtgtgcaggagaaagatggagagtgacaaagttcctagactacctgcaagtatttcttggtgtaataaacaccgagtggacaccggaaagttgagaacaaaccggcttattgtagtggaagattttggaga

SEQ ID NO: 213104 - DNA, 206 bp, Canis familiaris; identical to SEQ ID NO: 2997

SEQ ID NO: 213105 - DNA, 288 bp, Canis familiaris; identical to SEQ ID NO: 2998

SEQ ID NO: 213106 - DNA, 600 bp, Canis familiaris
tgggaaggggacagagtcagagtgtcccctcgggcctccagaaggagccagccctgcagacgtttggactttagcccactgagtccagcctccagaaacataagacaataaagtcgtgtcatttaaagtcaccacgtttgggctaatgcgttagagcagccacaggacactcccggcaagggtctctgagcgcattgccacgtgcccatccaaaatgttctaggccaactgcgaggcatagagatgctagagctagggagcctacctgcaaggaactggcacaaatacttagagtattaaagaggaaaacaagaaatcacagaagcaggcctcggatccagcaccctgagcattccgagggaagagggtgggttcccggcaggggtgtcaggagaagccttcggaagggagtccgcccttccaaagtagggcgcccagaaactgggtgcctggggagcgggaaggaggcctggtcgaggcgtaaccgggacccgcaggtggaaatcgtgcgctcgcaggagagcgtgtttatggaaccgttaatgcttcaggattcttcttgcagtgggggacccagttgccttcaaggacctgcccggg

SEQ ID NO: 213107 - DNA, 600 bp, Canis familiaris
gtccggctgccggcatgagcacctggtggacgtcttcacgcagatcgcctcctacgtggcctacagcaacagctgcctcaacccgctggtgtacgtgatcgtgggcaagcgcttccgcaagaagtcccgggaggtgttccggggactgtgccagaaagggggctgcgtcctggagtccaacaagatggacaactccatgggcaccctgcggacctccgtctcggtggagcgccagattcacaaactgcccgagtgggcggagaacagccagtgaggggccgcggccgccaggaccacggttcgtgtgtgtgaggaccgggggacagcagagcttcaggatatgcctgacaaggaatggcaggcaggccacgtgtgtggcctcggccaataagtcgatgtctctggtaaaacccaggagcttggctcctgtcccatgcaagctgcagggggtcaggccgggagggtggggtggcctcacacccagccaaggggccccataaacacgacagtattattgtcctcatttgccaccgcctctgggccagtctgcatctttccaggagtggaaggggcctggggacagggacaggagtgactgag

SEQ ID NO: 213108 - DNA, 269 bp, Canis familiaris; identical to SEQ ID NO: 3001

SEQ ID NO: 213109 - DNA, 270 bp, Canis familiaris; identical to SEQ ID NO: 3002

SEQ ID NO: 213110 - DNA, 270 bp, Canis familiaris; identical to SEQ ID NO: 3003

SEQ ID NO: 213111 - DNA, 270 bp, Canis familiaris; identical to SEQ ID NO: 3004

SEQ ID NO: 213112 - DNA, 159 bp, Canis familiaris; identical to SEQ ID NO: 3005

SEQ ID NO: 213113 - DNA, 384 bp, Canis familiaris; identical to SEQ ID NO: 3006

SEQ ID NO: 213114 - DNA, 272 bp, Canis familiaris; identical to SEQ ID NO: 3007
  misc_feature (15)..(15): n is a, c, g, or t
  misc_feature (74)..(74): n is a, c, g, or t
  misc_feature (76)..(76): n is a, c, g, or t
  misc_feature (122)..(122): n is a, c, g, or t
  misc_feature (154)..(154): n is a, c, g, or t
  misc_feature (169)..(169): n is a, c, g, or t
  misc_feature (181)..(181): n is a, c, g, or t

SEQ ID NO: 213115 - DNA, 600 bp, Canis familiaris
aaaaaatgcaggagggcattgtgcatgtgctcaaacttcacctgcagaccaaccacccggacaacatctttctcttcccaaaactccttcaaaaaatggcagacctccggcagctggtcaccgagcacgcacagctggtgcaggtcatcaaaaagacggagtcggacgcagccctgcaccccctgctgcaggaaatctacagggacatgtactgacggcttgagagcgaaccgcacgacaagcagctcttcgaggacttttaaagtcgacagcactacaaatgaaaactgggagcaatgcctgctttgcacaaattccaccattttcaccttagagaatgggacggatgagccctaggtaaccggaaacctagaccacatttctttctttttcacatcagtacttgtaagagcgtgccaagtgtcgaaacgccggtgacaggtagctgataggcagttcttggaaaattaaggggaatgatgcccagcagtctgattttaactcacttgatgttaatccatgcagatttctttatatcacattagccgtgtagccttgaattaactggtgaccttgaaaaaaaaaaaaaaaaaaaaaaaa

SEQ ID NO: 213116 - DNA, 1400 bp, Canis familiaris
ggggcttcagcgggtcgcacatattagaggtgatggaaggactacacactacgcagacgctatgaagggccgattcaccatctccagagacaacgccaagaacacgctgtatctgcagatgaatagcctgacagtcgaagacacggctatttattactgtgtaaaggacatatactatggggtcggggactattggggccagggaaccctggtcaccgtctcctcagcctccaccacggccccctcggttttcccactggcccccagctgcgggtccacttccggctccacggtggccctggcctgcctggtgtcaggctacttccccgagcctgtaactgtgtcctggaattccggctccttgaccagcggtgtgcacaccttcccgtccgtcctgcagtcctcagggcttcactccctcagcagcatggtgacagtgccctccagcaggtggcccagcgagaccttcacctgcaacgtggtccacccagccagcaacactaaagtagacaagccagtgttcaatgaatgcagatgcactgatacacccccatgcccagtccctgaacctctgggagggccttcggtcctcatctttcccccgaaacccaaggacatcctcaggattacccgaacacccgaggtcacctgtgtggtgttagatctgggccgtgaggaccctgaggtgcagatcagctggttcgtggatggtaaggaggtgcacacagccaagacccagtctcgtgagcagcagttcaacggcacctaccgtgtggtcagcgtcctccccattgagcaccaggactggctcacagggaaggagttcaagtgcagagtcaaccacatagacctcccgtctcccatcgagaggaccatctctaaggccagagggagggcccataagcccagtgtgtatgtcctgccgccatccccaaaggagttgtcatccagtgacacagtcagcatcacctgcctgataaaagacttctacccacctgacattgatgtggagtggcagagcaatggacagcaggagcccgagaggaagcaccgcatgaccccgccccagctggacgaggacgggtcctacttcctgtacagcaagctctctgtggacaagagccgctggcagcagggagaccccttcacatgtgcggtgatgcatgaaactctacagaaccactacacagatctatccctctcccattctccgggtaaatgagcaacacgcccggcacccagcaagccccccacccttggctctcaggatcccctgaggacacctgagcccctgtccctgtgtacataaccctgggtaggcacccatcatgaaataaagcacccagcactgccctgggccctgcaaaaaaaaaaaaaaaaaaaaaaaaaaaaaaaaaaaa

SEQ ID NO: 213117 - DNA, 600 bp, Canis familiaris
ctcgtgactgcccggacacccacagtcacttgtgtggtggtggatctggacccagaaaaccctgaggtgcagatcagctggttcgtggatagtaagcaggtgcaaacagccaacacgcagcctcgtgaggagcagtccaatggcacctaccgtgtggtcagtgtcctccccattgggcaccaggactggctttcagggaagcagttcaagtgcaaagtcaacaacaaagccctcccatcccccattgaggagatcatctccaagaccccagggcaggcccatcagcctaatgtgtatgtcctgccgccatcgcgggatgagatgagcaagaatacggtcaccctgacctgtctggtcaaagacttcttcccacctgagattgatgtggagtggcagagcaatggacagcaggagcctgagagcaagtaccgcatgaccccgccccagctggatgaagatgggtcctacttcctatacagcaagctctccgtggacaagagccgctggcagcggggagacaccttcatatgtgcggtgatgcatgaagctctacacaaccactacacacagatatccctctcccattctccgggtaaatga

SEQ ID NO: 213118 - DNA, 600 bp, Canis familiaris
aggattacccgaacacccgagatcacctgtgtggtgttagatctgggccgtgaggaccctgaggtgcagatcagctggttcgtggatggtaaggaggtgcacacagccaagacgcagcctcgtgagcagcagttcaacagcacctaccgtgtggtcagcgtcctccccattgagcaccaggactggctcaccggaaaggagttcaagtgcagagtcaaccacataggcctcccgtcccccatcgagaggactatctccaaagccagagggcaagcccatcagcccagtgtgtatgtcctgccaccatccccaaaggagttgtcatccagtgacacggtcaccctgacctgcctgatcaaagacttcttcccacctgagattgatgtggagtggcagagcaatggacagccggagcccgagagcaagtaccacacgactgcgccccagctggacgaggacgggtcctacttcctgtacagcaagctctctgtggacaagagccgctggcagcagggagacaccttcacatgtgcggtgatgcatgaagctctacagaaccactacacagatctatccctctcccattctccgggtaaatga

SEQ ID NO: 213119 - DNA, 600 bp, Canis familiaris
tggtgggcatgagatgcactgtcttctgccaggactcccgagccaaagacagactggcggtggtgggtggagtcttcttcatcattggaggcctcctgggcttcatccccgttgcctggaaccttcacgggatcctgcgggacttctactccccgctggtacccgatagcatgaagttcgagatcggagaagctctctacctgggcattatttcctccttgttctccctggtagctggcatcatcctctgcttttcctgcccactccagggaaatcgctccgactactatgactcctaccaggcccagccccttgcaactagaggctctccaaggccgggtcaaccgcccaaagccaagagcgagtttaactcctacagcctgacagggtatgtgtgaagaaccaggggccagagctaggggggcggttggtggccgagtctgtgaaaaccagtgaacagcacctcccaaaccaccacccctggggccacaggtgagggacattggcactgtatcatgtcagaaggtgctgctgaggctagattgactttgcccactggatcaagtgaaggcagaaatgagaactggtgcaacagcatgc

SEQ ID NO: 213120 - DNA, 600 bp, Canis familiaris
gactcgctgctggcgctgccgcaggacctgcaggcggcccgcgccctcatcgtcgtgtccatcctgctggccgccttcgggctcctcgtggcactcgtgggcgcccagtgcaccaactgcgtgcaggacgacacggccaaggccaagatcaccatcgtggcgggagtgctcttcctgctggccgccttgctcaccctggtgccggtgtcctggtcggccaacaccatcatccgggacttctacaacccgctggtgccggacgcgcagaagcgggagatgggcgcgggcctgtacgtgggctgggcggccgcggctctgcagctgctggggggcgcgctgctctgctgctcctgcccgccgcgcgacaagaagtacgcgcccaccaagatcgtctactccgcgccgcgctccgccggccccggcaccagcacagcctacgaccgcaaggactacgtgtgaggggcagcggcggggagcccccagcacccgtcgagctacagcgcccctgtccggcgtgcagcctctcggagaccaacccactccagacgccccgagctctcccacgggactgggaggggccagcccggcggccccttcccc

SEQ ID NO: 213121 - DNA, 429 bp, Canis familiaris; identical to SEQ ID NO: 3014

SEQ ID NO: 213122 - DNA, 480 bp, Canis familiaris; identical to SEQ ID NO: 3015

SEQ ID NO: 213123 - DNA, 281 bp, Canis familiaris; identical to SEQ ID NO: 3016

SEQ ID NO: 213124 - DNA, 1400 bp, Canis familiaris
ttgctgtagagaccagccgcctggcaaaaaaggtgttcctcagcaccactggaggggcatgggtgatgagccgagtctttgactcaggatacccatgggacatggtgttcatgactcgatttcagaacatgttcagaaattctctcccaactccaattgtgacgtggttgatggcaaggaagatgaacagctggttcaatcatgcaaattatggcttagtaccagaagacaggacgcagctgagagagcctgtgctaaatgatgagcttccaggctgtatcatcacaggaaaagtgctcataaagccaagcataaaggaggtgaaggaaaattctgttgtatttaacaacaccccaaaggaagagcccattgatatcatcgtctttgccactggatacacctttgctttccccttccttgatgagactgtagtcaaagttgaaaatggccaggcatcgctgtacaagtacatcttccctgtgcatctgccaaaaccaaccctggctgtcattggcctcatcaaacccttaggctccatgatacccacaggagaaacacaagcacgatgggctgttcgagtcctgaaaggtataaataagttaccaccacaaagtgccatgacagaggaagttaacgcaagaaaagaaaacaaacccagtgggtttggcttgtgctactgcaaagctttacaatcagattacatcacatacatagatgaactcctgaccaatatcaatgcaaaacccaacctattctcattgctcctgacggacccacgcctggctttgaccatcttctttggcccatgcacaccataccagttccgcttgactggcccagggaaatggaagggagccagaaatgctatcttgactcaatgggatcgaacattcaaagtcaccaaaactcgaattgtacaagaatccccaactccctttgcaagcttgcttaaactcttaagccttctggctttgctaatggccattttcctaattttcctataagaagtacccagatggcctgtcagatgcacatagtagatttacagtgctctggtccctccattcccacatcatgaccctcacagccttgaactatattcaagtggtgaaggccacctcccatccttccctggctgaccccaaggctaccactggtattcctggacctctcccagccccacctgctcccagtgctagagcaagataatcatgatttctgtgcatttgaaggctactgggaagttccatgttcattttacaaagagagttgtttacggcagcactctgagcatttatatctctctctcatataaaccatttcataggcctcaaataaaaccccctaattcacaaaagatttggttgtactaaaatgatgttgttaggtatcagctgatt

SEQ ID NO: 213125 - DNA, 600 bp, Canis familiaris
caaatcctccaggcaatatgtcctgatccctggccaaaaattatagcatggatggggatccctgggtggctcagcaatttggtgcctgccttcagccctgggtgtgatcctggagaccggggatcaagccccacatagggctccctgcatggggcctgcttctccctctgcctgtgtctctgcctctctctctctctctctgtgtctctctcatgaataaataaataaaatcttaaaaaaaaaaagtatagtatggagacctggtctataatgaaagttaacaagaagtaacattatggactgataaaggatataatattcttctcaaacttatgtagccaacacattctcttaatgtcctattaatgtcaatctttctccatacttaagacatgaattattttaactatttttgatgtcttaattacttctttattaacagcgatgatttttgatcactcatttttgctctcaagttttactgataaaattaaatatatatttatgtcttaaaagatatacaatttgaacatatgaagcacaaaagatcttttcactcccaatttcatctcatcatatctatattctcaataaggacac

SEQ ID NO: 213126 - DNA, 600 bp, Canis familiaris
cagtattataaccatgccatagactggcagacagggagtgggtgtagtgcagctggctttttcactgtattttcaagtgagctttctgtctacaccctcacagtcatcacactagaaagatggcacaccatcacctatgctcttcagctggaccaaaagctgcgtttaagacatgccattccaattatgcttgggggatggctcttttccactcttatcgccatgttgccccttgtgggtgtcagcaattacatgaaagtcagcatttgcctccccatggatgtagaaaccactctctcacaagtatacatattaaccatcctgatactcaatgtggtggccttcatcatcatttgtgcttgctacattaaaatttattttgcagttcaaaatccagagctgatggctaccaacaaagatacaaagattgctaagaaaatggcggtccttatcttcactgatttcacctgcatggcaccaatctctttttttgccatctcagctgccttcaaaatgcccctcatcacagtaaccaactctaaagttttactggttcttttttatcctgtcaattcttgtgccaatccatttctgtatgct

SEQ ID NO: 213127 - DNA, 582 bp, Canis familiaris; identical to SEQ ID NO: 3020

SEQ ID NO: 213128 - DNA, 81 bp, Canis familiaris
ggggccgcgcatgaggagctccaacagtcccgcatccgcatcgacagcctctcggcccaactcagccagctgcaaaagcag

SEQ ID NO: 213129 - DNA, 76 bp, Canis familiaris
attgtctttcagcaagggacaacaaagctcagtgtagaaaagaacaaaacttctattacgagtgacattggtatgc

SEQ ID NO: 213130 - DNA, 519 bp, Canis familiaris; identical to SEQ ID NO: 3023

SEQ ID NO: 213131 - DNA, 352 bp, Canis familiaris; identical to SEQ ID NO: 3024

SEQ ID NO: 213132 - DNA, 600 bp, Canis familiaris
  misc_feature (90)..(90): n is a, c, g, or t
  misc_feature (92)..(94): n is a, c, g, or t
ctcctgttctgagaagtgtggggctagggtgagaagcaacaaagaaccttctagtttcttccttcacctctctctctctctctctctctnbnnnybtctctctctctctgtctcatccatccatccatccatccatccatccatccatccatccagtcatccatccagccagacatccttctctatatctttgtcctggcaagaggcagggttgggggggctttggagaacagatgccaccatatcctcacagccaaaaccccttaggaaccctacgaacagaaaagctcctcttattacagttagattctttccacccagagtctaagctctgccccagcctgggcagacccacctgggggcttcctcttagcctctggacacatccattacacacttcccaacccgcagatttggggagctgcatggctgttgggaagccagttcctccactctttccattagggactttccagtgcagaggccccatcaccccatcactctggcccccgagggcaggtccgtgcctccctcatcagtgggggaccctatccttccctggccatattatgcaccccctttactccttcctgtctcagt

SEQ ID NO: 213133 - DNA, 600 bp, Canis familiaris
aaagaaagaaagaaagaaagaaagaaagaaagaaagaaaaagaagaaaaagaaagctagctagctagcttagctgtttgggaaagaggccagtgatgtcaaagttagaatgcacttatcaaagtagacagtatttaatgtattgggagttaaataagatcagagaaaaatccttcacaagattgtttgtccctgggcctggggcttggaatatcagggtttaatctaactggaccatataagtccatgttctcctatggttcaagtcgctatggagagcaatgacccagacagacactctggcatatgaagttgtcatggcctcttgctttgagccacttctaatccttccccccttgttcaagaccattggtttcatgggcaggccaggcatcaagttgctgtaagtgacgcacgctcatggttctggtggcctctctccctcagcgaccgctggccctgtcggtggtgagccagatgaaggacccaacctttgcaacattcatgtaccagctcccctgtgggaagcagactgccttcttctcgtcccagggccaggagtacatggtggtgttctgggacgggaaagaggaatccaggt

SEQ ID NO: 213134 - DNA, 600 bp, Canis familiaris
gatgacaaaatatgttccacggatggcttaacaacccatactgtgggcagttcggctcagcgagtgtgtggcaccatgggatcaggagtgaaaaatggagggcaggagagcattgaaatggtgaaaggtggacatcagaccctggaatcatgccgggggactgggcatcatcacaccctggattcctgtaggggaggacatgtggaggtggacacctgcagatacacctactccgaatggcataatttcactcagccccgccttggtgaagaatccattagaggacacactctgattaaaaattaaacaatgaaagaaggtgcaactgtgtaatcaagatgacaagcataagcatgctcaagactatgtccttacatataactatgaaggaaaaggatccgtggctggttctataggttgttgcagtgaacgacaagaagaagatgggcttgaatttttggatcatttggaacccaaatttaggacactagcagaagcatgcatcaagagatgagtgtattctgataaatctacaaaatccagtgactttatctccttccaaccaccacttttttcattaccagccagatttaaaaaaaa

SEQ ID NO: 213135 - DNA, 600 bp, Canis familiaris
  misc_feature (304)..(304): n is a, c, g, or t
gtctgggctgtgacagagctggcacggaccccatctgtgtacctgtcccttatgagctggggaagtggggaatggagggtgactgcagtggggcccggcactagtaggaagcagtagtgttggaggtcggccctggtgtttcccctgaaagcctgtgcaaggagccaagatgggcccctacaatcctgttccccgccccactccccaactcctcctgcagcctgggaactcacctgtgcctggacctagaatgacttggtccattctatccacagacagggagcccggatgctagacttgaganagcttgctggtcacctggagagggaattgtagaactcacatttgaactcaggcctttgatgatttcattatatgtcactgtagtgtgtaagccccccaacatacacacacacacacacacacacacacatacacacaggcacaatgtctcccttacctgaatggctttaccagctacttgttccatctcaactaccactcaccaagtacctaccgtaattcttgacacttacataaatgccagccctgggaggtagcggttgttgcttttttttttttttttttttttttttattg

SEQ ID NO: 213136 - DNA, 270 bp, Canis familiaris; identical to SEQ ID NO: 3029

SEQ ID NO: 213137 - DNA, 270 bp, Canis familiaris; identical to SEQ ID NO: 3030

SEQ ID NO: 213138 - DNA, 589 bp, Canis familiaris; identical to SEQ ID NO: 3031

SEQ ID NO: 213139 - DNA, 236 bp, Canis familiaris; identical to SEQ ID NO: 3032

SEQ ID NO: 213140 - DNA, 230 bp, Canis familiaris; identical to SEQ ID NO: 3033

SEQ ID NO: 213141 - DNA, 230 bp, Canis familiaris; identical to SEQ ID NO: 3034

SEQ ID NO: 213142 - DNA, 301 bp, Canis familiaris; identical to SEQ ID NO: 3035
  misc_feature (276)..(276): n is a, c, g, or t

SEQ ID NO: 213143 - DNA, 218 bp, Canis familiaris; identical to SEQ ID NO: 3036

SEQ ID NO: 213144 - DNA, 338 bp, Canis familiaris; identical to SEQ ID NO: 3037

SEQ ID NO: 213145 - DNA, 257 bp, Canis familiaris; identical to SEQ ID NO: 3038

SEQ ID NO: 213146 - DNA, 359 bp, Canis familiaris; identical to SEQ ID NO: 3039
  misc_feature (159)..(160): n is a, c, g, or t
  misc_feature (173)..(173): n is a, c, g, or t
  misc_feature (295)..(296): n is a, c, g, or t
  misc_feature (330)..(332): n is a, c, g, or t
  misc_feature (334)..(334): n is a, c, g, or t
  misc_feature (349)..(349): n is a, c, g, or t

SEQ ID NO: 213147 - DNA, 334 bp, Canis familiaris
aaatttgagaagaatttttatcaagaacaccctgatttggctaggcgcacagcacaagaggtggagacatacagaaggagtaaggaaattacggttagaggtcacaactgcccaaagccagttctgaatttttatgaagcaaacttccctgcaaatgtaatggatgtgattgcaagacagaattttactgaacccactgcaattcaagctcagggatggcccgttgctctaagtggtttggatatggttggagtagcacagactggatccgggaaaacattgtcttatttgctgcctgctatcgtccatatcaatcatcagccattcctagaga

SEQ ID NO: 213148 - DNA, 294 bp, Canis familiaris; identical to SEQ ID NO: 3041

SEQ ID NO: 213149 - DNA, 256 bp, Canis familiaris; identical to SEQ ID NO: 3042

SEQ ID NO: 213150 - DNA, 456 bp, Canis familiaris; identical to SEQ ID NO: 3043

SEQ ID NO: 213151 - DNA, 253 bp, Canis familiaris; identical to SEQ ID NO: 3044

SEQ ID NO: 213152 - DNA, 600 bp, Canis familiaris
ttggttgtgaccaattaaaatgtcaaccttaggtgagtaggacttgggtttctcgttgctcagatggatttggggtttcggcaggtgaaagcaagggtaaagcagtaaggaggaaagaaattggtgtcctaggcctgctgcagggggcttcagcacatgccccctgcctcctgtggaccacgcagcatatgggcgcaggtgcacgctctcctcaaagttgtctggtctctgctggagctgttctttggacaggcaagtcctggggccacgtgaatgtgatggtaagtgtgcatgagtgtgcgatgctgtgtgtaggggatgctgtgagtgtgtgtgtgtgtgtgtgtgtgtgtctgtctcactcagcctgtccacttttccactggtaaccatatgggcctccaggctgcttccccatagacctggattagtccccctcctgcataggccagagccccagcactaggtgagtactgagtgcagagacagcctggaaccctgtgttcttgcctccaccttggcttctgggcctgagaatcaagtctgtttgttcaggttcactgtgggggcacagaagagctccggcatcccttcaagtgt

SEQ ID NO: 213153 - DNA, 297 bp, Canis familiaris; identical to SEQ ID NO: 3046

SEQ ID NO: 213154 - DNA, 406 bp, Canis familiaris; identical to SEQ ID NO: 3047

SEQ ID NO: 213155 - DNA, 600 bp, Canis familiaris
cgtggggggtgtgggggggaggcctggaccagtccctacaggtgagcaaacgagatgctcgtgttctggcagccggggctgtggcagtttgtcacatgggcagttccacgcccgtgatatttatcttgagttttcttttgtctggaacctgatgcatctaagggtctctgtttctccttcgacaaccccagctaagcacatgtctccagacccctctccatagcgggaccttctctccccccgacacacacttggcaaactgctatgcccagccacagtgggcagctcccaacagcattcaagcacacgcatacacacacacacacacacacacacacacgcacgggctgttgacccagcaggagtctggggactttgaggacagggtttgcaggaggttcgggttctgcttcattggtaagaggctctcactactgccctgcctgcaccaggcacaatcctcccctccaggggggtgagctgcactcagtcatctggggccatgctaaggccctggggcagggtgggctctgggaggggggttgtggtcaggcctggatgtggccgccctgttccatccatgccactggcctaaaagga

SEQ ID NO: 213156 - DNA, 591 bp, Canis familiaris; identical to SEQ ID NO: 3049

SEQ ID NO: 213157 - DNA, 576 bp, Canis familiaris; identical to SEQ ID NO: 3050

SEQ ID NO: 213158 - DNA, 546 bp, Canis familiaris; identical to SEQ ID NO: 3051

SEQ ID NO: 213159 - DNA, 271 bp, Canis familiaris; identical to SEQ ID NO: 3052

SEQ ID NO: 213160 - DNA, 314 bp, Canis familiaris; identical to SEQ ID NO: 3053

SEQ ID NO: 213161 - DNA, 352 bp, Canis familiaris; identical to SEQ ID NO: 3054

SEQ ID NO: 213162 - DNA, 352 bp, Canis familiaris; identical to SEQ ID NO: 3055

SEQ ID NO: 213163 - DNA, 347 bp, Canis familiaris; identical to SEQ ID NO: 3056

SEQ ID NO: 213164 - DNA, 445 bp, Canis familiaris; identical to SEQ ID NO: 3057

SEQ ID NO: 213165 - DNA, 233 bp, Canis familiaris; identical to SEQ ID NO: 3058

SEQ ID NO: 213166 - DNA, 183 bp, Canis familiaris; identical to SEQ ID NO: 3059

SEQ ID NO: 213167 - DNA, 399 bp, Canis familiaris; identical to SEQ ID NO: 3060

SEQ ID NO: 213168 - DNA, 182 bp, Canis familiaris; identical to SEQ ID NO: 3061

SEQ ID NO: 213169 - DNA, 280 bp, Canis familiaris; identical to SEQ ID NO: 3062

SEQ ID NO: 213170 - DNA, 205 bp, Canis familiaris; identical to SEQ ID NO: 3063

SEQ ID NO: 213171 - DNA, 307 bp, Canis familiaris; identical to SEQ ID NO: 3064

SEQ ID NO: 213172 - DNA, 242 bp, Canis familiaris; identical to SEQ ID NO: 3065

SEQ ID NO: 213173 - DNA, 335 bp, Canis familiaris; identical to SEQ ID NO: 3066

SEQ ID NO: 213174 - DNA, 441 bp, Canis familiaris; identical to SEQ ID NO: 3067

SEQ ID NO: 213175 - DNA, 190 bp, Canis familiaris; identical to SEQ ID NO: 3068

SEQ ID NO: 213176 - DNA, 132 bp, Canis familiaris; identical to SEQ ID NO: 3069

SEQ ID NO: 213177 - DNA, 388 bp, Canis familiaris; identical to SEQ ID NO: 3070
  misc_feature (297)..(297): n is a, c, g, or t
  misc_feature (299)..(299): n is a, c, g, or t

SEQ ID NO: 213178 - DNA, 137 bp, Canis familiaris; identical to SEQ ID NO: 3071

SEQ ID NO: 213179 - DNA, 294 bp, Canis familiaris; identical to SEQ ID NO: 3072

SEQ ID NO: 213180 - DNA, 301 bp, Canis familiaris; identical to SEQ ID NO: 3073
  misc_feature (245)..(246): n is a, c, g, or t

SEQ ID NO: 213181 - DNA, 283 bp, Canis familiaris; identical to SEQ ID NO: 3074
  misc_feature (223)..(224): n is a, c, g, or t

SEQ ID NO: 213182 - DNA, 265 bp, Canis familiaris; identical to SEQ ID NO: 3075

SEQ ID NO: 213183 - DNA, 426 bp, Canis familiaris; identical to SEQ ID NO: 3076

SEQ ID NO: 213184 - DNA, 600 bp, Canis familiaris
gccagcagctatttggggctgattagaacctggaatcagaagaaagaaagagagagcagtgagagagaaagagagagagaaagaaaggaaagaaagaagagaaagaaagaagaaagaaagaaagaaagaaagaaagaaagaagagaaagaaagaaagaaagaaagaaagaaagaaagaaagaaagaaaggaaggaaggaaggaaggaaggaaggaaggaaggaaggaaggaaggaaggaaggaagaaagagaaagaaagaaagaaagaaagaaagaaagaaagaaagaaagaaagaaagaaagaaagaaagaaagaaagaaagaaagaaagaaagagaacctagaatcgattcattttgttgcatgggggaaagaggggctgacgaggcaggctggtaaaatccttactggcaaggctgcctgccactttgccaaggtccccaccagcccaggcacagagacacagcactggttaacggattccttccttcctcccaagttgtaaactggcagtctgtgggccacacggagcttgcagattcgttttcgttgggctcatagagcatagctggaaaaattgcagtttattgccactattta

SEQ ID NO: 213185 - DNA, 201 bp, Canis familiaris; identical to SEQ ID NO: 3078

SEQ ID NO: 213186 - DNA, 307 bp, Canis familiaris; identical to SEQ ID NO: 3079

SEQ ID NO: 213187 - DNA, 285 bp, Canis familiaris; identical to SEQ ID NO: 3080

SEQ ID NO: 213188 - DNA, 322 bp, Canis familiaris; identical to SEQ ID NO: 3081

SEQ ID NO: 213189 - DNA, 321 bp, Canis familiaris; identical to SEQ ID NO: 3082

SEQ ID NO: 213190 - DNA, 311 bp, Canis familiaris; identical to SEQ ID NO: 3083

SEQ ID NO: 213191 - DNA, 325 bp, Canis familiaris; identical to SEQ ID NO: 3084

SEQ ID NO: 213192 - DNA, 327 bp, Canis familiaris; identical to SEQ ID NO: 3085

SEQ ID NO: 213193 - DNA, 600 bp, Canis familiaris
aagaagaggacaatgttccaaaagatcgtggatcagtctaaaacatatgaaactcagcaggagtggacacagtacatgatgctggagcagacacggaaggaaattgttatggccatgatgatgaccgcctgtgatctctcagccatcaccaagccctgggaggtgcagagtaaggtagctctactggttgctgccgaattctgggaacaaggtgacctggagcgcacagtgctgcagcagaatcccattcccatgatggacaggaacaaggcagatgaactccccaagcttcaagtcggcttcattgactttgtttgcacctttgtctacaaggaattctcccgtttccacgaggagatcactcccatgctggatgggatcaccaacaaccgcaaggagtggaaggcgctcgccgatgagtacgacaccaagatgaaggccctggaggaggagaagcagaagcagcagacagccaagcaaggggcggcaggagatcagccggggggcaaccccagcccggccgggggcgcacctgcatccaagtcctgctgcatccagtaacgctgcctggcatcagctgcaccgaatggtaccaccctt

SEQ ID NO: 213194 - DNA, 600 bp, Canis familiaris
  misc_feature (580)..(580): n is a, c, g, or t
  misc_feature (585)..(585): n is a, c, g, or t
  misc_feature (588)..(589): n is a, c, g, or t
  misc_feature (594)..(594): n is a, c, g, or t
gggatagagtcccgcatcagggtccctgcatggagcctgcttctccctctgcctgggtctctgtctttctgtctctctgtctctctgtgtgtgtgtctctcatgaataaataaataaatctaaaaaaaaaaacccaaatccacccatattaaaaaaagaagtttctatgaacagaaagataatgataaaagaaagaatcttgggacatcagaaaggaagaaaaaacaatataaagagtgaaaatacaatcaaatacaatgcatttcccactgtaagtttcctaatttatgactgacagtgaaaaattagaacactgtctgatacacctattatgtatatgtagaagaaatagttgaaacaactatattgttaatggggaagggtaaaaggaggtaaagatttccatacttgacttgaccaggtaaaatgctgacaccagtagcttatgataagcggatgatagatagatagatgatagatagatagatagatagatagatgatagatagatagatagatagatagatagatagatagatagatagactgacagataaacaggcagaatgatcccacggcnaccgngcnngaatncgtaat

SEQ ID NO: 213195 - DNA, 600 bp, Canis familiaris
  misc_feature (1)..(1): n is a, c, g, or t
  misc_feature (8)..(8): n is a, c, g, or t
  misc_feature (12)..(12): n is a, c, g, or t
  misc_feature (36)..(36): n is a, c, g, or t
  misc_feature (529)..(529): n is a, c, g, or t
  misc_feature (582)..(582): n is a, c, g, or t
  misc_feature (588)..(588): n is a, c, g, or t
  misc_feature (598)..(598): n is a, c, g, or t
ngctcganttcntaatcatggacacacctgtttctngcccacctccccaccacaaaaatattagctcaggtctgtgctatgaaaggcccacatctcagattacctttctaacttggactaattcctcactgagagccaggtgggttaaatgcagactctttcctcaggtaagaagtctgaactttattctacaggcgagtgacatttcaaactatgttccatagacaggggtttagagaggaggaaataaagcagagagcaagggacaaacaagtgctgtctgagttctttacctgagcttcaactgaagtacctgtgctcattcctgctttaaggtgagacttatgaggtaaattttgcccaacagaggacatgagaggaaggaaggaaggaaggaaggaaggaaggaaggaaggaaggaaggaaggaaggaaggaaggaaggaaggaaggagagaggaaggaagatgggaagaagggaataaagggagggaggaagagaggaaagagatggtaacttggaggcatanaatttgaaaggttttatacaaaggagtgaaatgatccccgggtaccgagctcnaattcntaatcatggnca

SEQ ID NO: 213196 - DNA, 600 bp, Canis familiaris
  misc_feature (237)..(237): n is a, c, g, or t
  misc_feature (585)..(586): n is a, c, g, or t
tgctctattactgttctttttaagatacagtagaactaaatataagtgaggcagcactgtgattgatgcacaagtaggaaaatatgaatgaaaacacagtgcatcaaaagtcatgggaggcagtgaagcagtacttagagggaaattttgcagcatttaacctttattaaaaaggaagaaagagaagaatggcttcatatcaacaaagtcagattccctttaaataatttttttcanaatagggaaaataaactcaaaataggacaagaaaagagggaagaaaggaaggaaggaaagaaggaagggaggaaagaaaggaaggaaggaaggaaggaaggaaggaaggaaggaaggaaggaaggaaggaaagaaggaaggaaggaaaacatcacggcaataaatgaactagaaaatagaaaaagaatagaaaaaaatcacaatcaaaagctggatttttgaggagattgatgtaaaggataaacctctgaccagagtaataagaaagattagaaaaattataagaaatataagaaatgagagaggtgaaatcattacagatactactgatccccggcgaccgcccanngaatccgtaatcct

SEQ ID NO: 213197 - DNA, 600 bp, Canis familiaris
  misc_feature (598)..(598): n is a, c, g, or t
cctccgtggtcaataaaacaaaaatagccatagcctcaaaccataaacagtcatgtgtactgtgaaatgctgtggagtctgtaccaaaatgaagagagaatctgagccaacacaaacttcagacatggaagaggaaagagatttccttaaaagggtcatagtcttgacagtgttatctaattatttgattaaagtattaggccatgaaaatgggtgcatcctgtgagtaggaaaatataccagaaattttatcccacagaaggtcaaggaaggtggcatagaaggcaaaaccatttttctgtttatttccctgtcgtctagtttaggaaaggtttcaaacactgaagctgcatgaagaagggagaggagacagaaaccactagattccaatactaagagctgcgttgctgatagtaatacagacatagatagctagatgatagatggatagatgatgatagatagatagatagatagatagatagatagatgatagatgatagaatggtcctattcaagaattagttgtagtcaaagaaagataagtagggattacagaagcacaataggatccccggtaccgagctcgattcgtatnct

SEQ ID NO: 213198 - DNA, 1284 bp, Canis familiaris; identical to SEQ ID NO: 3091
  misc_feature (5)..(5): n is a, c, g, or t
  misc_feature (7)..(7): n is a, c, g, or t
  misc_feature (11)..(11): n is a, c, g, or t
  misc_feature (14)..(15): n is a, c, g, or t
  misc_feature (18)..(18): n is a, c, g, or t
  misc_feature (21)..(21): n is a, c, g, or t
  misc_feature (657)..(657): n is a, c, g, or t
  misc_feature (1254)..(1254): n is a, c, g, or t
  misc_feature (1260)..(1260): n is a, c, g, or t
  misc_feature (1263)..(1263): n is a, c, g, or t
  misc_feature (1269)..(1269): n is a, c, g, or t
  misc_feature (1275)..(1275): n is a, c, g, or t

SEQ ID NO: 213199 - DNA, 600 bp, Canis familiaris
  misc_feature (310)..(310): n is a, c, g, or t
  misc_feature (319)..(319): n is a, c, g, or t
  misc_feature (540)..(541): n is a, c, g, or t
  misc_feature (553)..(553): n is a, c, g, or t
  misc_feature (563)..(563): n is a, c, g, or t
  misc_feature (572)..(572): n is a, c, g, or t
  misc_feature (575)..(575): n is a, c, g, or t
  misc_feature (581)..(582): n is a, c, g, or t
tacacaagacactggagcttctgtcagaaaaattttaaaagaagtagaaaagaaagaaagaaagaaagaaagaaagaaagaaagaaagaaagaaagaaagaagaaaggaaggaaggaaggaaggaaggaaggaaggaaggaaggaaggaaggaagaaagaaagaaagaaagaaagaaagaaagaaagaaagaaagaaagaaagaaagaagaaagaaagaaagaaagaaagaaagaaagaaagaaagaaagaaagaaagaaagaaagaaagaaaaccctacacgttttttcgtatagttttgaacagatanaggccaaanaagctgttctggtgtggcttgcatccggctgtgttttttcttaagcaaccgattgctcaggaaactcacttctgggactgagaagtttggtttaggtttctcagaatgcctaaatgtctgaccacttttcatcacagaaggctggacctatgattaactactggtttcctttgttttaccaaatagatgtaacctatcaacttcagctgtaacataagatnnccgggtaccgancggaattagngtcttaaantcnccgggnnccgagctcgaattcgaat

SEQ ID NO: 213200 - DNA, 600 bp, Canis familiaris
  misc_feature (105)..(105): n is a, c, g, or t
  misc_feature (141)..(141): n is a, c, g, or t
  misc_feature (168)..(168): n is a, c, g, or t
  misc_feature (218)..(218): n is a, c, g, or t
  misc_feature (249)..(249): n is a, c, g, or t
  misc_feature (270)..(270): n is a, c, g, or t
  misc_feature (324)..(324): n is a, c, g, or t
  misc_feature (327)..(327): n is a, c, g, or t
  misc_feature (356)..(356): n is a, c, g, or t
  misc_feature (365)..(365): n is a, c, g, or t
  misc_feature (373)..(373): n is a, c, g, or t
  misc_feature (384)..(384): n is a, c, g, or t
  misc_feature (435)..(435): n is a, c, g, or t
  misc_feature (461)..(461): n is a, c, g, or t
  misc_feature (475)..(475): n is a, c, g, or t
  misc_feature (478)..(479): n is a, c, g, or t
  misc_feature (481)..(481): n is a, c, g, or t
  misc_feature (496)..(496): n is a, c, g, or t
  misc_feature (510)..(510): n is a, c, g, or t
  misc_feature (524)..(524): n is a, c, g, or t
  misc_feature (551)..(551): n is a, c, g, or t
  misc_feature (555)..(555): n is a, c, g, or t
  misc_feature (557)..(557): n is a, c, g, or t
  misc_feature (560)..(560): n is a, c, g, or t
tgtccacagaaggaaagaaagaaacagagagagagaaagagaaaggaagaaaaaaaggaaggaaggaaggaaggaaggaaggaaggaaggaaggaaggaaggaangaaggaagggagggaggaagggagggaaggaggganggaggaaaggaggaaaaaagttattanactagctgaactaagaatcatctgcagttctaccagtctgtggttagtcntgattacaagaataaaaagaaaaactactcnactattaaatggaggcactantacagataacagaaataaaccaccttatcagaaggatgtgttagggccccccantcnagattgaaaaaaaaaacaaaaacaaaacnttggtccantctcaganaaagcaactantggtcttcttgtggtgcacagattatctaattaacttcatctctcatctancctcgtgtctgaccctcttgaccccncgccacagccctantcnnanctgctcccctaatcnctcttctgataaantcagaatgaacaantggcatggatgttgacttgttttctcnccancnttncttgatccccgggttccaaccccaattccttatcctggtc

SEQ ID NO: 213201 - DNA, 600 bp, Canis familiaris
  misc_feature (270)..(270): n is a, c, g, or t
  misc_feature (518)..(518): n is a, c, g, or t
  misc_feature (585)..(585): n is a, c, g, or t
  misc_feature (588)..(589): n is a, c, g, or t
  misc_feature (591)..(591): n is a, c, g, or t
aaggaagaagaagaagaagaagaagaagaagaagaagaagaagaagaagaagaagaagaagaagaagaagaagaagaaagaaagaagaaagaaagaaagaaagaaagaaagaaagaaagaaagaaagaaagaaagaaagaaaaagaaagaaagaaagaaagaaaagaagaaagaaaaggagaaaagctaaaataacaaaacaataaaataaccatacatgagtactaaccacacctgctgaatcaggctcagtaatccgtgcatttaacnaagcactttctgggtgagtgttaccaggcaagtttgggtcatactaccttgggtcatgctaccttaggacagagatttccaaaattagctcattaccagaatcacctggagggtttttaagactcacagatttctgggccttcatatggactttgtgaattagggtctaaatagaggaatctgtgtttccaaaacagctcctcagatggttctagatatgcgactcaatgtagtagaatatgttgagntacatttgctcacacatggaactcagttcagatttaatgggtaatgagatcctctagagtcgacttncanncntgcaagcgt

SEQ ID NO: 213202 - DNA, 600 bp, Canis familiaris
  misc_feature (543)..(543): n is a, c, g, or t
  misc_feature (569)..(569): n is a, c, g, or t
  misc_feature (573)..(573): n is a, c, g, or t
  misc_feature (581)..(581): n is a, c, g, or t
  misc_feature (599)..(599): n is a, c, g, or t
actaattatactctctactaaggctgaagtgttatggcaaaaaaaaaaaaaaaaaaagaaagaaagaaagaaagaaagaaagaaagaaagaaagaaagaaaggaaggaaggaaggaaggaaggaaggaaggaaggaaggaaggaaggaagaaagaaagaaagaaagaaagaaagaaagaaagaaagaaagaaagaaagaaagaaagaaagaaatcaagattatgttaccagagcagtaattctcaaatttcagcatacatgatagttatctgaagggtttactaaaacaagactttctgggtcccactcccagaatttctgtctcagtaggcctggagtagggatgaagaatttgcatttctaccaagatattgttgtggccatctgtagaaaatacattctgccataggcagacatagaacagtgtctattatatctccactgaaggattcttaagtctcttgaagtcctcactagaagcctgtggtctagcatcagagcataggatgtcggttcagcagagcatcatgtgggagcatttcntggggaccaccactaagtttgatctnacgncgacgcgngcagtgaatccgtaatcnt

SEQ ID NO: 213203 - DNA, 1105 bp, Canis familiaris; identical to SEQ ID NO: 3096
  misc_feature (4)..(4): n is a, c, g, or t
  misc_feature (6)..(6): n is a, c, g, or t
  misc_feature (18)..(18): n is a, c, g, or t
  misc_feature (688)..(688): n is a, c, g, or t
  misc_feature (730)..(730): n is a, c, g, or t
  misc_feature (738)..(738): n is a, c, g, or t
  misc_feature (1075)..(1075): n is a, c, g, or t
  misc_feature (1079)..(1079): n is a, c, g, or t

SEQ ID NO: 213204 - DNA, 600 bp, Canis familiaris
  misc_feature (218)..(218): n is a, c, g, or t
  misc_feature (556)..(556): n is a, c, g, or t
ggattagctgacaatatatttagggcaggtagcacaaaataaacgatggctcctccagatagcggaacacacacagtcttagaaatgattgaacagtcaggctttgccctcagtggggtgtctgtttgaggttctctctttccccttgcctctccccaccctccccccaactccctctcaaataaatcgatggatggatggatggatggatggaaggnaggaaggaaggaaggaaggaaggaaggaaggaaggaaggaaggaaatgatagcataaggtgtgctaactggcatttactagcacagaaagatacccaacacatgaaatgaatgggcagcatgcaaaatactcatttttgtcaatggctagagacaaacagttcagaaatttataaatgattatttctggctggtgagcttataggtgttctttcattgtttcagcttccttgagttttctagtttctctacgataaagcacacttctataaaataaaaggtttctatgaccaaaaagtacagcacacagtaagtgcttcagtaattggctattatgantgatgatccttctaggagcttggcaaagaaaagacccaggatcc

SEQ ID NO: 213205 - DNA, 600 bp, Canis familiaris
  misc_feature (97)..(97): n is a, c, g, or t
  misc_feature (572)..(572): n is a, c, g, or t
aagggaagaaggaaggaaggaaggaaggaaggaaggaaggaaggaaggaaggaaggaaggaaggaaggaaaggagggagaagggaaggaagaaaganagaaagaattttaaaagccttttgcagaggcactctgcttaattagaaaccttccattaattttaacaaaaagtgattaggtgaaagcttgggttgccttgggtgtattgggcttccttttcttcctttttgttttccatttaaatatgtaaggtctctgccactttaaagttctatgtattttaacaaatacttaaataacagattcagatatttgtctctttcaactcaaatattctgtccttcctattcattgttctttctcaaatcaatcccccccccaatcaaagttaaatggggagacacgagatgagacccactgaataatcagttagtagatttcttctcttatgcgttcatagcccatggattcatgcttcttcatttttctaaggggggggggagacgcagaattgatggaagacagctgaaaacagtcagctgcgtgaagtccagcactacccagcatctgatntaaagacgacggcgcagtgaatccgtaa

SEQ ID NO: 213206 - DNA, 600 bp, Canis familiaris
  misc_feature (509)..(509): n is a, c, g, or t
  misc_feature (516)..(516): n is a, c, g, or t
  misc_feature (527)..(527): n is a, c, g, or t
  misc_feature (530)..(530): n is a, c, g, or t
  misc_feature (540)..(540): n is a, c, g, or t
  misc_feature (572)..(572): n is a, c, g, or t
  misc_feature (575)..(575): n is a, c, g, or t
  misc_feature (593)..(593): n is a, c, g, or t
agaagcttaaaagaataaacaagatgagattcatgagatagcatttcagaatggagcttaggtacagctaagctgagctaaggagtaacagaaggagaaagtgcatgtcaaaaaaggaaggaaggaaggaaggaaggaaggaaggaaggaaggaaggaaggaaggaaggaaaggagaagaaagaaaggaaaggaactaaggaaggaaggagaaaggaaggaaagaaagaaaaccctaaaatgcctctgccctgtgaatcttgtgggcggcaaacttccttcacaaagtgcatgtttgtgttttgagggactgagagtccagagacaagtttaaacacacataagttcaatttaaaagtaaataagataacactggaggaaattaatgatgcaatgtccctttttatgtaacacattttctttggaattcaaaatatatctacttaaaaatgacacatcaatttaaggcaactgggtggctcaattgggtaaggtccaaatctaattcanctcaagncatgaagtcanggncatgaaaatnaaccctgcatccgggttctgtgctcaacaatngantcggcttaaaaatccccntttcccc

SEQ ID NO: 213207 - DNA, 600 bp, Canis familiaris
  misc_feature (375)..(375): n is a, c, g, or t
  misc_feature (379)..(379): n is a, c, g, or t
  misc_feature (520)..(520): n is a, c, g, or t
  misc_feature (534)..(534): n is a, c, g, or t
  misc_feature (539)..(539): n is a, c, g, or t
  misc_feature (554)..(554): n is a, c, g, or t
  misc_feature (582)..(582): n is a, c, g, or t
  misc_feature (591)..(591): n is a, c, g, or t
agaaatgtttacaaaggaaatattgttacatgcaataatgtaagtgaatatccagttaattaaactgagtagaaaaaaaaaaccaattccagaacattacatactgcatgattttattcatatgacattgttaaaataacaaaataataaaaatggagaccagggctgtctggctggcttagtcggtggagcgtacgacgcttactcttggggttgtgaattcaagccccatgtagagtgtagatgttactttaaaatattagaaggaaagagagagagagagagagagagggaagaagggagggaaaaagaaagaaagaaagaaaaaagaagaaagaaagaaagaaagtaggaaggacggccggaacgaaggangganggaaggaaggaaggaaggaaggaaagaaaagaaagaaaaagaaatggagaccagattaacagctgctaagcatcaagaagggaatagttatgggaggtaaacgggtatgactgtaaaaaggcaactggttgggggaatccntgcatttaaggaantgttntgtatctcgaccatnttggatgtcaagatcccacggctaccgngcttgaatncgtaatcct

SEQ ID NO: 213208 - DNA, 600 bp, Canis familiaris
  misc_feature (513)..(513): n is a, c, g, or t
  misc_feature (536)..(536): n is a, c, g, or t
  misc_feature (595)..(595): n is a, c, g, or t
gtgttctgtcttatatttgttgttagaagtagtcatttggccttacttcagtggcatttgataaaacagctctcttgaaagagagaaagaaagaaagaacgaaagaagaaagaaagaaagaaagaaagaaagaaagaaagaaagaaagaaagaaagaaaaagagaagaaagaaagaaagaaagaaagaaagaaagaaagaagaaagaaagaaagaaagaaagaaagaaagaaagaaagaaagaaagaaagagaaagaaagaaagaaggaaggaggaagggaaggaaggaaggaagaaaagaagagaaagaagaaggagaagaagaagaggaaacaaagaaagaaaggccatgtttgtagtgtttgccaatttccacagtgtaatactcctatcacggttgatttcaagctaccagcatgacatcactgaatgcagagtccatgaaggtgggaagagcagcaaagaatggcttccagtgagccaacaggaatcagctccagcacagcgtatgancctgttggttggttatacaaaanttctgtgatgggtacaggcaaaagagcttctttttggcctgtattcctcaagctaccanagcta

SEQ ID NO: 213209 - DNA, 600 bp, Canis familiaris
  misc_feature (562)..(562): n is a, c, g, or t
aagacagccaagtcgctcctggaaggtgtggctctgcttctagaagcattaaatggcccttgtgctgggacttattcctccagcctcagccagaacacagtgaggattttaactggcatccacgcacattatttttttctactgaaagccctaaaacatcctcccacctatgtaacgtgcattaagcactaaagtttccccatcagttaagcaggaatttagttcttgcagacattaaacaaaatctttttaaattaaaaattagcccttacattcttttaaaatctcgaagccgctgacttcaggcagcaggtgaatcttgaatgaaggggcagacattctagctgaccagcaataaatagatagatgatagatagatgatagatagatagatagatagatagatagatagatagatagatgatagataaaatccctcatgaaacaactccttttcctggctcacaatggtctttatctttttatagataaaagccaccgtcatacttcaccctctccctctgctcctccccctgctcacgcttgatccccgggtaccganctcgaattcgtaatcatggtcatagctgtttcctggaa

SEQ ID NO: 213210 - DNA, 1400 bp, Canis familiaris
tgccccggaccctctctccacctactccagctggcaacggcagcagggagctgctggacacccgggacccgctgcttgtccaggccgagctagccctgctctccacggtcttcgtggctgtggccctgagcaacggcctggtgctgggggccctggcgcgccgggtccggcggggtcgctgggcacccatgcacgtcttcattggccacttgtgcctggccgacctggctgtggctctgttccaagtactgccccagctggcgtgggatgccacggaccgcttccgtgggcctgatgccctgtgccgggcagtcaagtacctgcagatggtgggcatgtatgcctcctcctacatgatcctggccatgacgctggaccgccaccgcgccatctgccgccccatgctggcataccgccacggaggtggagctcgctggaaccggccggtgctggtggcctgggccttctcgctcattctcagcctgccccagctcttcatctttgcccagcgtgacgtgggaaatggcagtggggtccttgactgctgggcccacttcgctgagccctggggcctccgagcctatgtcacctggatcgccctaatggtctttgtggcacctgccctgggcatcgcggcctgccaggtgctcatcttccgggagattcactccagcctggtgccggggccagcagagagggctggggggtgccgtggagggcaccggaccggcagccccagcgagggggcccgggtgtccgcagccatggccaagacggtgaggatgacgctggtcattgtgatcgtctacgtgttgtgctgggcgcccttcttcctcgtgcagctgtgggcagcgtgggacccgcaggcgcccctggaaggggcccccttcgtgctgcttatgttgctggccagcctcaacagctgcaccaacccctggatctacgccttcttcagcagcagcgtctcctccgagctgcgcagcctgttctgctgggcccggagtcgggccccacccagcctggggccccaagaggagtcctgcgccacggccagctccttcctggccaaggacacttcctcctgaggagccaaggggcgccttccttccagaggctctgcgaggcccggctgcctacctggggctggccctcggacccctggggggaggagaccctctgggagggggctctgggactaggagccagaggtcagctccttggggcctagcgtgggggggctagggcggcagccgggggcctcgtctggggggcgcacaaggcctccacgcagcgggtgcctgcccctgacaggaggctcctcggagcccgggaggaaggaaaggggtagggggcctctctgctccccctctgccctcccctctcactctgtccctaataaa

SEQ ID NO: 213211 - DNA, 1187 bp, Canis familiaris; identical to SEQ ID NO: 3104

SEQ ID NO: 213212 - DNA, 789 bp, Canis familiaris; identical to SEQ ID NO: 3105

SEQ ID NO: 213213 - DNA, 555 bp, Canis familiaris; identical to SEQ ID NO: 3106

SEQ ID NO: 213214 - DNA, 600 bp, Canis familiaris
  misc_feature (494)..(494): n is a, c, g, or t
  misc_feature (527)..(527): n is a, c, g, or t
  misc_feature (538)..(538): n is a, c, g, or t
  misc_feature (557)..(557): n is a, c, g, or t
  misc_feature (573)..(573): n is a, c, g, or t
  misc_feature (578)..(578): n is a, c, g, or t
  misc_feature (580)..(580): n is a, c, g, or t
  misc_feature (583)..(583): n is a, c, g, or t
  misc_feature (587)..(587): n is a, c, g, or t
ttccagcacttccgtcaaacagcgagcctaggccttttagaagccaagggtaccagcaggctggctgtggaggtataggccataagctcaactctcagaagtgtgtatgcatgggaggcagatgtctgctacccactcggacatgggagttggaacctagctacactgtgattgaaaacgccattggaaatcgctgtattcaactcagatacacgggagttcaggcccagtgctcacacatgcttttcccgcaacctctcccagccaataaaataaggatgttagcagctactcctacagtcaggcaggatgcgggagggttctgccctgtcctcagctctcacagggaagcatgtcttgaagccagctgtcaaatagctgcattcctatggcagtgagaaggtagcagtactctgagtcaggaggttccaagattaccactctactgcacctggagataccctccaggtctgcattgttaccctgcgtctcangaagcctttggcaaaagtttttgttgaagaccngcgaaaatcantttgcaggcagtgtggaantgtgagggaattaggntgagntnaantttnagaagtaagatgg

SEQ ID NO: 213215 - DNA, 557 bp, Canis familiaris; identical to SEQ ID NO: 3108
  misc_feature (2)..(2): n is a, c, g, or t
  misc_feature (5)..(5): n is a, c, g, or t
  misc_feature (300)..(300): n is a, c, g, or t
  misc_feature (314)..(314): n is a, c, g, or t
  misc_feature (518)..(518): n is a, c, g, or t
  misc_feature (538)..(538): n is a, c, g, or t
  misc_feature (549)..(549): n is a, c, g, or t
  misc_feature (551)..(551): n is a, c, g, or t
  misc_feature (556)..(557): n is a, c, g, or t

SEQ ID NO: 213216 - DNA, 600 bp, Canis familiaris
  misc_feature (139)..(139): n is a, c, g, or t
  misc_feature (144)..(144): n is a, c, g, or t
  misc_feature (156)..(156): n is a, c, g, or t
  misc_feature (158)..(158): n is a, c, g, or t
  misc_feature (179)..(179): n is a, c, g, or t
  misc_feature (187)..(187): n is a, c, g, or t
  misc_feature (192)..(193): n is a, c, g, or t
  misc_feature (249)..(249): n is a, c, g, or t
  misc_feature (277)..(277): n is a, c, g, or t
  misc_feature (286)..(286): n is a, c, g, or t
  misc_feature (389)..(389): n is a, c, g, or t
  misc_feature (404)..(404): n is a, c, g, or t
  misc_feature (526)..(526): n is a, c, g, or t
  misc_feature (528)..(528): n is a, c, g, or t
  misc_feature (537)..(537): n is a, c, g, or t
tgtccatcgaaagacgagtggatagaaaagatgtggtttatgtatacaatggaatattactcagctatttagaaatgacaaatacccaccatttgcttcaacgtggatgaacctggagggtattatgctgagtgaagtnagtcnatcggagaaggncnaacattatatgttctcattcntttggggnatatnnataatagtgaaagggaatataagggaagggagaagaaatgtgtgggaaatatcagnaagggagacagaacgtaaagactgctanctctggganacgaactaggggtggtagaaggggaggagggcggggggtgggagtgaatgggtgacgggcactgggggttattctgtatgttggcaaattgaacaccaataanaataaattaaaaaanacaaaaaaataaaaataaaaataaaaaataaaaagcccttgccacgttccagctaataatagaaaagacataacatggcaacctgctctacccaaaaaagaatctattaaactataatattnanctatatttnaaaaatttatattgaatattctcattgccaaaacaccaccatttgcataaggtttggatgttt

SEQ ID NO: 213217 - DNA, 600 bp, Canis familiaris
  misc_feature (567)..(567): n is a, c, g, or t
  misc_feature (578)..(579): n is a, c, g, or t
  misc_feature (597)..(598): n is a, c, g, or t
gccattagaaacgacaaatacccacgatttgcttcaacagggatggaactggagggtattacgctgagtaaagtatgtcaatcggagaaggacaaacagtgtatgttctcatacatttggggaatataaataatagtgaaagggaatataacggaatggagaagaattgtgtgggaaatatcagaaatggagacagaatataaagactcctaaatctgggaaacgaactaggggtggtagaagggcaggagggagggggatgggggtgaatgggtgatgggcactgagggggacactggacgggatgagcactgggtgttattatgtatgttggtaaattgaacaaaagtaaaaaattactttattaaaaagaagattcatagaaactaatacgaatgaagatattaccatacaaaatccttgtaatgcagccaaagcattctaaggggggaatacatcacagtacaagcatccattcaaaaactggaatgaactcaaatacaaaagctaaccttactcataaaggagctagagaaaaagcagcagatagatcctctagagtcgacntgcaggcagcnngctgtcaattccaaaggnntt

SEQ ID NO: 213218 - DNA, 600 bp, Canis familiaris
  misc_feature (51)..(52): n is a, c, g, or t
  misc_feature (108)..(108): n is a, c, g, or t
  misc_feature (110)..(110): n is a, c, g, or t
atggataaaaaaaaagtggtatagcacatacacatacacatatacaatggnntattattcacccatgagaaagaaggaaatcctgccatttatgccaacatggatacnanttgagtacattatactaagtgagataagtcagaaatactgtatggtatcatttacatgaggaatctaaacaagccaaacttaaaaacagaacagaatggttgtcaccagagcctgagggatgaggaaataggagagaagttgtttaagggtacaacctagcagctaatagataaataagtccctggagatgtaatgcacagtatagtgattatagagaacaacgctgcattataaataacacatttgctaagagactaaatcttaattattctcatcagaaagaaagaaatgacaattatatgatgtcctagaagctttaactaacactacaatggcaactatattgcaatatataaaattaacatgcataccttaaacttatgcaatgttacatttcatttaaatctcaatttttttaatggaaaacttctgggttaattcatagacagctttgtaattattattttcttcatcattatgatgagatgt

SEQ ID NO: 213219 - DNA, 600 bp, Canis familiaris
  misc_feature (92)..(92): n is a, c, g, or t
  misc_feature (271)..(271): n is a, c, g, or t
  misc_feature (342)..(342): n is a, c, g, or t
  misc_feature (371)..(371): n is a, c, g, or t
agtcaccaggacctggtgtggttcatgtgggaacgagagtcaccagtccaggtgagacccagttggtgaccacagtcaccaggtgcagtttngtggcttagggggggggaccagagtcatcaggaccatttgaggccaaaggtggagcaaagttatcatgtccaagtgaggcccaggtgggaacagagtcaccatgtcccattgatgccaggtgggaaaagagtcacaaggtccagatgaggcccaagtgaggaatagattcaccaggacntgttgaggcccagttgaggaccagtgtccccagctccgggtgagtcctagagggggaccagagtcacccgnttctggtgatatccaggtggggacaagantcaacacgtcagggtgaggcccagagtgggacgagaatcactaggtccaggcgaggccccgatgtggaactgagaaaccaggtcccatgatgcccatttgaggacctgagtcaccaggtccatgtgaggtcgctgtgggaaccagtgacctcatccaggtgaggcccaggtgggaccactgtcatcatgtccaggtgaggcccaggtatataagagagtatccaggtcc

SEQ ID NO: 213220 - DNA, 600 bp, Canis familiaris
  misc_feature (499)..(499): n is a, c, g, or t
  misc_feature (553)..(553): n is a, c, g, or t
  misc_feature (574)..(574): n is a, c, g, or t
  misc_feature (588)..(588): n is a, c, g, or t
ctggtcccatctggaagtcacctggaccaggtgattctcgtacccctctagacctcaaccaattctggtgactctggtcctccactggacctcacctggacctagtgaatatgctccatctgggccaaatttgcacctggtgactctgtcactacctgggcctcatcgggacatggttccactgcatgacttgcaggttggcctcacctggacctggtaactctggtccctacctgggcatcatcgggacatggttccacacatgcctgcaggttggcctcacctggacccggtaactctagttcctacctgggcatcatcgggacattgttcctctgcatggcctgtagattggactcacctggacctggtgagtggcgttgccaccttggcctcacccatgcctggtgacacaggtccccacctgggcctcacttggacctggtgaatctggtccttacctggtcctcacccgaaactgctaactcggttaaccacntgggaatcacctgaaccaggttaatttggtccccatctggtccacatccaatcntggtgaatttatcaccccacntggacctgattgcngtggttctttct

SEQ ID NO: 213221 - DNA, 582 bp, Canis familiaris; identical to SEQ ID NO: 3114
  misc_feature (14)..(14): n is a, c, g, or t
  misc_feature (581)..(581): n is a, c, g, or t

SEQ ID NO: 213222 - DNA, 600 bp, Canis familiaris
  misc_feature (568)..(568): n is a, c, g, or t
  misc_feature (575)..(575): n is a, c, g, or t
  misc_feature (582)..(582): n is a, c, g, or t
  misc_feature (592)..(592): n is a, c, g, or t
atgtctttactgctaagtggaatctttctacaatgtgatgtgatttctcctatcttaccttttgcacagatataaaaactgttccatatactaatgtgtttggaaggatataaaagctgggtcttttatgcctctgaatggaagaagagattttccttagacttcacctttaggcatcaacattctgtcaaggcctcaccaagaactctgagaaaatgtcaaaattatgggctgcctgggtggctcagtggtttagcacctgccttcagcccagggtgtgtcttggagtcctgggatcgagtcccacattgggctccctgcagggaacctgcttctccgtctgcctgtgtctctggctctctctgtgtctctcatgaataaataaataaaatctttgggaacaaaaatgtcaaaattaggctgtgcataattcatcctactgagtttgagtcttctctcaatacactacaatcatgacatgctgtccagtttgtaaagtattaatacatctgcagtctcacttgatggtcaaggttgtcttgtgatgaaggcaggagaggtccagtcnggagacnagtgtgnccatgaaaangcagttga

SEQ ID NO: 213223 - DNA, 529 bp, Canis familiaris; identical to SEQ ID NO: 3116

SEQ ID NO: 213224 - DNA, 600 bp, Canis familiaris
  misc_feature (402)..(402): n is a, c, g, or t
gaaagagacacccccccaaaaaaatgagagattatagcccaatttttggacatagaaagtgggaagagaatgataagtgacttggcagagtggaaacaattccactaagtgctttcagaggccatgccccaaaaagcaggccaaatgtatatgctaccagccatggtagaaagcagggcaaaggcttggtgaagcctacattcagaatggatttcaagtttcactgcatcaacttggtctggtcactggaaatttattatggagaaatttcaagactcagaatctgtggagagcagaggagagatgggcatggcttggaaaggggacacatccatacagtcatgcggtctcttgcttcccttgaccacagaatcagtagcaagatattcaaactcccctacnttctctattccttctaagcttaaaagcagactactcttctctgaaggagctgaaagaccctaggggaaaatcttccagctacttggattttgtggggtttatttgtattaagattttatttatttattcattaaagacatagagagagagagagagagagagaggcagagacatagggagaagcaggctccatgcagg

SEQ ID NO: 213225 - DNA, 600 bp, Canis familiaris
  misc_feature (270)..(270): n is a, c, g, or t
  misc_feature (423)..(423): n is a, c, g, or t
tgcatgagaatcactaggatatttgttaaaaatgctaactcttgacttaggacatggccaaggagtctgcattttaaatgtgtcttgggtaattctggtgcagttgatgagcagaccacactttgtgaaaactgatttcctcaataacaaatgaatatacttttctcaaaaaaattattattctcctggttataaaataaaaggtttagagaatgctaacaataaaaaagaatatagaaatcatttgtgaaaaaaaaaaaaaaagaaatncatttgtgggcacccctggtggtgcagcggtttagtgctgcctgcagcctggggtgcgatcctggagacccggaatcaagtcccacgtcgggctccctgcatggagcctgcttctccctctgcctgtgtctctgcctctctctctctctctgngtgtctctcatgaaaaagtaaataaaatcttaaaaaaaaagaaatcatttgtcattatactttctatagatgatgattaccaatatcttgatggctgtccctctagtccttttttaaaaatatgcgacctaggggcatctgggtggctcagtcggttaagcatgtgcttttggctca

SEQ ID NO: 213226 - DNA, 504 bp, Canis familiaris; identical to SEQ ID NO: 3119

SEQ ID NO: 213227 - DNA, 804 bp, Canis familiaris; identical to SEQ ID NO: 3120
  misc_feature (25)..(25): n is a, c, g, or t
  misc_feature (182)..(182): n is a, c, g, or t
  misc_feature (204)..(204): n is a, c, g, or t
  misc_feature (210)..(210): n is a, c, g, or t
  misc_feature (215)..(215): n is a, c, g, or t
  misc_feature (217)..(217): n is a, c, g, or t
  misc_feature (225)..(225): n is a, c, g, or t
  misc_feature (236)..(236): n is a, c, g, or t
  misc_feature (252)..(252): n is a, c, g, or t
  misc_feature (266)..(266): n is a, c, g, or t
  misc_feature (278)..(278): n is a, c, g, or t
  misc_feature (281)..(282): n is a, c, g, or t
  misc_feature (288)..(288): n is a, c, g, or t
  misc_feature (296)..(296): n is a, c, g, or t
  misc_feature (309)..(309): n is a, c, g, or t
  misc_feature (314)..(314): n is a, c, g, or t
  misc_feature (318)..(319): n is a, c, g, or t
  misc_feature (322)..(323): n is a, c, g, or t
  misc_feature (327)..(327): n is a, c, g, or t
  misc_feature (356)..(356): n is a, c, g, or t
  misc_feature (360)..(360): n is a, c, g, or t
  misc_feature (363)..(363): n is a, c, g, or t
  misc_feature (379)..(379): n is a, c, g, or t
  misc_feature (453)..(453): n is a, c, g, or t
  misc_feature (456)..(456): n is a, c, g, or t
  misc_feature (463)..(463): n is a, c, g, or t
  misc_feature (484)..(484): n is a, c, g, or t
  misc_feature (495)..(496): n is a, c, g, or t
  misc_feature (508)..(508): n is a, c, g, or t
  misc_feature (514)..(514): n is a, c, g, or t
  misc_feature (530)..(530): n is a, c, g, or t
  misc_feature (534)..(534): n is a, c, g, or t
  misc_feature (558)..(558): n is a, c, g, or t
  misc_feature (591)..(591): n is a, c, g, or t
  misc_feature (593)..(593): n is a, c, g, or t
  misc_feature (613)..(613): n is a, c, g, or t
  misc_feature (622)..(622): n is a, c, g, or t
  misc_feature (625)..(625): n is a, c, g, or t
  misc_feature (629)..(629): n is a, c, g, or t
  misc_feature (649)..(649): n is a, c, g, or t
  misc_feature (663)..(663): n is a, c, g, or t
  misc_feature (665)..(665): n is a, c, g, or t
  misc_feature (689)..(689): n is a, c, g, or t

SEQ ID NO: 213228 - DNA, 600 bp, Canis familiaris
  misc_feature (11)..(11): n is a, c, g, or t
  misc_feature (52)..(52): n is a, c, g, or t
  misc_feature (314)..(314): n is a, c, g, or t
ctctctctctnatcaggaataaataaataaaatctttaaaaaaaaaaaaaancaacataaaagtaaacacctgagttttccataagtaggaaaggtgttaataaaaaaaaaactcttgaaaataataaagaaattccacagtgtaaaattacaaatagtcaacatgtgctttaggaaagttaaaactttaaaatattataaaaggaaaatgtgattcagtaaaaatatttcctttatataaatattaatacttgtttaaataaaccttaaaactcaagggaatgcaagttaaaaaaccagttaaactgatattncaaacagtaatattcaaaagcacattgatttttgcagtactgaaaacagcttttaaataaatctgcatatgtaaattacccatataattgaagattcactttcaaagtaacaaaatcttatttatagttgagtttttagtgaatctgcaaattataaatttattcattttggtgtactgttactcagtttaacatttttcttgagacgatgtgactgtcattctgaacactaattttgagtttggcattgagcagggcctgataagcattcagttcatatttaatg

SEQ ID NO: 213229 - DNA, 600 bp, Canis familiaris
  misc_feature (19)..(19): n is a, c, g, or t
  misc_feature (43)..(43): n is a, c, g, or t
  misc_feature (49)..(49): n is a, c, g, or t
cctgtgtctctgctgcttntctctctctgtgggtctctcaggnaatagnataaataaaatcttagggaaaaaaaaaaaggaaactgccaagtttttttaccaacgtggctgctccagtgggtacactacccacccaggagtgagggttacagttgctctgcatcctctccaggctttgaaattgtctgattttttttttgtttaatttaaaccattgtaataaatgtagttagtatcttactgtaatttaaaaaataccttatttaaggtttaattgatataatctaagttgttaccatatctcgtgctctttattttttaatgtagctctacacttccatttgatatagttttacttctgaaaggactttctttactatttcctgtcatgtggggctcctgatgaccagtcttttcagtttccatttgctttcattttagaaagaaattttccctggatatagaatcctagattgactttttttttaaaataatactttaaatatgctagctgctgtccttttgcttatggtatttctaacacaaaatctgctgacatctttatctttgttcttctgtttataatgtgttttgtcatca

SEQ ID NO: 213230 - DNA, 600 bp, Canis familiaris
  misc_feature (84)..(84): n is a, c, g, or t
  misc_feature (546)..(546): n is a, c, g, or t
ttcagcccagggcatgaccctggggactcaggattgagtcccacgtcgggctccctgcatggagcctgcttctccctctgcgtngtgtatctgcgcctctctctctctctctcagtctctcaggaataaataaataaaatctatttaaaaaaaaaaagaaaatgaatactgcagccatatcaatcctttattcagcaatatgccttaagtcaccactttgtacaaaaaccttgagttctctaaggcctaacacattacctctgaactgtcccacctccacagtgtggggcctcactaccttctcgtgtgtgtaaccatatgtgtcctgcctgtctccttacactccttcactttctgctcctttcaggtgcctataaaccctctcgcctctacctgggatatcccagcctcattaaaggcttggctgttttccgtgccatttcttgttacacaactgctccagcctccaaatagtaataaagtcaacttcttaacataatatttatttttttgcttatttcctgtgttagtcttatcattaacttntgtagggaagaggtcccatattcatccagagcctatcagaatgggagaggaggt

SEQ ID NO: 213231 - DNA, 600 bp, Canis familiaris
aattaatgtatggaagcagttgagttgctttatttatttaggtttcatttaagttatttatgtactgagattcctacaggtaaaaaaaatgaattatctaaattataattcattttttgttcatggaaggcatgaattacatgaatattatggataataaaagggtctcaaaggggacactggggtgcctcagtggttgggcctctgccttcagctcagggcataatcccagagccccgggaccgagtcctgcattgggctccctgcatggagcctgcttctccgtctgcctatgtctctgcctctgtctctccctctctctgtgtgtctctcatgaatgaatgaataaattaattaattaattaatccttttaaaaattagagtctttgggtacctaaaaacatttaacactgacacatataaatacttgtactcaggttggtagtaaggcaccaggtagtagcaatagaaaaaaaaaatctcttatacaagagacttgatggtccatggcaaggagcagagagaagatagtcagggtagaggggctgctagataggacttatggctgtaggtagaacacacctgctgccaaaagtgct

SEQ ID NO: 213232 - DNA, 600 bp, Canis familiaris
  misc_feature (588)..(588): n is a, c, g, or t
  misc_feature (591)..(592): n is a, c, g, or t
  misc_feature (595)..(595): n is a, c, g, or t
aaatttgactcctgtagattctgattcgatacaagtttggtcactactttctcccttcatatgagctactttgcctataccaaaatcccgatctccagtagttttcgttagtctcattttaaaattaaaaatgacttctgtgagtctgatataaagggaaaaaagctcttaggtagaaaacctcctgggtcttccttctaccctgaaactaattttaagaaagctaattaaaggaattgatttctgggcagccctggtggcccagtggtttagcgccaccttcagcctggggcgttatcctggaggccccgggattgagtcccacatggggtccctgcatggagcctgcttctccctctgcccgggtctctgcctctctctctctctctctctctctctcaggaataaatgggtaaaattttaaaaaaaaaaaattaaaaaaaaaagttgattcccatttcaatgattcctgggtaacttcttccagcaagaacactggtatacaagctataggtacccatatgggaagagaagtggactttgaccaagggcagagcggaaagaccaaaatatggtccagaattagtntgnntcngccag

SEQ ID NO: 213233 - DNA, 341 bp, Canis familiaris; identical to SEQ ID NO: 3126
  misc_feature (154)..(154): n is a, c, g, or t

SEQ ID NO: 213234 - DNA, 736 bp, Canis familiaris; identical to SEQ ID NO: 3127
  misc_feature (16)..(16): n is a, c, g, or t
  misc_feature (56)..(56): n is a, c, g, or t
  misc_feature (84)..(84): n is a, c, g, or t
  misc_feature (242)..(242): n is a, c, g, or t
  misc_feature (274)..(274): n is a, c, g, or t

SEQ ID NO: 213235 - DNA, 549 bp, Canis familiaris; identical to SEQ ID NO: 3128
  misc_feature (8)..(8): n is a, c, g, or t

SEQ ID NO: 213236 - DNA, 600 bp, Canis familiaris
tgtaagcatcccccaattaattccatgataaaatgatacctaaatctgaaaagatgctgtagacatatttggtatttgattaaataaacaagtgtaaaactctagcagttgtaactggatggagggagaaggaaagtataccataagagtctgtttgaggaatccctgggtggcgcaacggtttggcgcctgcctttggcccagggcgcgatcctggagaccggggattgaatcccacatcaggctcccggtgcatggagcctgcttctccctctgcctgtgtctctacctctctctctctctgtgactatcataaataaataaaaattaaaaaaaaaaagagtctgtttgagtctcctttcctgccttcaaaggggtttaaatttgaggaagagaggaaggggtaaataaatatgtaaataatataagagagtcaacaaaaatctggtagattcaggtggagtggaatagccagaaggcattgaattaaaatggacagactcagaattatgaacgagaacactggtatgcagagcaagtgctggtttaaaaccctatccaacatggaccaactcaagttaaggacattcacagctaacc

SEQ ID NO: 213237 - DNA, 600 bp, Canis familiaris
  misc_feature (21)..(21): n is a, c, g, or t
  misc_feature (28)..(28): n is a, c, g, or t
  misc_feature (116)..(116): n is a, c, g, or t
  misc_feature (133)..(133): n is a, c, g, or t
  misc_feature (146)..(146): n is a, c, g, or t
  misc_feature (534)..(534): n is a, c, g, or t
  misc_feature (587)..(587): n is a, c, g, or t
ccaggatggagtcccacatcnggcttcntgcgtggaaccagtgcttctccctttgcgtatgtctctgcttctcttcatctgtgtctctcatgaataaatacgtaaaatactttttnaaaaatatgggagatanattatgaatctanaaggccttgacaccatccatgaccttttgtcttggaaacaaactccaaaggcagcaactgtaattggtcctccctacctagtaaccccctcacggatgccagtctcataacaaatccgaacaaggagtaaagcaataagagcacaaaaatgtgcacagatactttcaacaaagggatgaccaatgctttcaattaaaaaggaatctaaaaagaaaacagcaacatcattttaagtacagccagagcaactcattctgctacttcagcactccccaacccctccacctttcagagatgctgggttgacttttttcccatggaatgtgatgctctttctcagatattgtcatcaccatccgtaatgccaccagccttgtattataaccangggcctgtattactgttatgtgtggatatagaaaatgaagtacaggttatgtnatttacccatgat

SEQ ID NO: 213238 - DNA, 741 bp, Canis familiaris; identical to SEQ ID NO: 3131
  misc_feature (714)..(714): n is a, c, g, or t
  misc_feature (734)..(735): n is a, c, g, or t
  misc_feature (738)..(738): n is a, c, g, or t

SEQ ID NO: 213239 - DNA, 674 bp, Canis familiaris; identical to SEQ ID NO: 3132
  misc_feature (95)..(95): n is a, c, g, or t
  misc_feature (666)..(666): n is a, c, g, or t

SEQ ID NO: 213240 - DNA, 600 bp, Canis familiaris
tatgagtgagacaaaatcatttgcccttgggacgcctgggtggcttagtggttgagcttctgccttcagctcagggcgtgattctggaatcgagtccctcattgggctccctgcatggagcctgcttctccctctgcctgtgtctctgtctctccctctgtggttctcatgaataaataaacaaaatcttaaaaaaaaaatcatttgccactaatcatttttagttttttccattatataaaatcagcccattacataaagaattctgaacaaaaatacaattggatatattagtggctatttacgaagcgaccaactaatctagagaaaaatattaaagttatatacagagaaagcaaatataaaccataagcttccaccattgacacagcataattatgctaactagtcctcaaaagttttttctatttctcaaaatatttgattatcatcatataagcacatccccagattgaggccactctgccctatgccaagttcacagttgctagggaactaggaggcaaacacaaaagttattttgagacacctgggtggctcagccattgagcgtctgctttccacccagggcatgatccc

SEQ ID NO: 213241 - DNA, 600 bp, Canis familiaris
  misc_feature (507)..(507): n is a, c, g, or t
  misc_feature (525)..(525): n is a, c, g, or t
  misc_feature (537)..(538): n is a, c, g, or t
  misc_feature (546)..(547): n is a, c, g, or t
gaacccggagacctggtatcgagtcccacgtcgggttccatgcatggagcctgcttctccctctccctctgcctgtgcctgcatctgtttctctctgtgtctctcatgaataaataaataaaatctttaaaaaaataaaacctcaagtgtctgctaacgaaggagcatccctggtaaagaatgagccctaacctccctgggtccctgttgggccttgctgctgttaatggcttagaagggttctctggcctctaagagcccggatgagctgtggctatacaaaagcgggtctggaggctttaggtctgggtagggatagaggtaaatccctttgcctaataggaagatttggaggagggagtaaggcagagaaagcaatgagatggcccagggtcaggctctccaagggatgggtagccagtgaaaacccccgggggatgaggggttgtccagggaacattcaggaataggaaatctgttctctcatctgtgttaagtgtgctgttntcttcagtaatgccatgnctttctggggannctgacaanntcatggcttgtatttgcgggtgctttgatggtagcttgcagggcatgtgggag

SEQ ID NO: 213242 - DNA, 1400 bp, Canis familiaris
aatatgaagaaccaggctgaatcttattttagcaatgacagacaaaagtaattaaatgcatcctagagagaaacctttatgaaagtatatgattctctctagaatcataagaaactatgggtgaagttttccagaaaaatattagtattatataatcctttgaagcaattttcttgagaaatagtaaaatctgggccagactgtcttgcagttaattgcgtattgtcagagcagcatgagaaatacgatatttgttggatagggatttcggttactaaccactctctattgtgagagagtctctttattcctgaataatggaagaacagtactttggtgctgacatcaatgaggcacttttcttagtcctagtggaggatgcagtgtgctgttagaccagtaccacatctcgagtcttttcaagttttcattctctgtcaatatgacaggctggaaaatgacaatatgttataggctaaggcacacatgtttgcagtacactgaaaagtagatttcttctataacttttttcctctccccagtgaagagccctatgttatatttctaccatcactaatatttgaaagtatttcatgactaacgaactcagtacaacatgaaagttgttgctcatccgaaatatggtatcgtctatcaaaataaacacgtgaattttcacctacattatgtctttgccgctttaggtttgtttgatgttttcttacaagcaaaactgttaactataaatccattgtttatcttagatatatacatgtacacacatagagcataaaatactcagcagggctagttatttggatttcttgcacaactatttagctttttgtaagttcaacatgtaaattttaaagacaaatatagagagacctatgtgtttgaaatataaatgatatatatggattagcatgtacctgtatattattaaacatgcaatgaactgactggtaagtgatgtctaattgtatggctagcaatgtaatttattcagactgtatttttgtacagagcagcgcacactaacctatgcctctgtgtcctctttaatgcctaaaactgtgcctagaaatttcatctgtcttaagaaataaaattatacttcatgctgtttatgctatagtttctctactgctgttctatatttattatttttaaatatatgacatgtttactacttaaatatgaatccatggtattctggttattttttttaacagtcctctggggggaacctgtttctcactccagtggttttgagtttgcagtttcacaatcagttcttcatttcatgatttttgtagctgacatatgaagttatctatgtggataaaataaaaataaaagtggtttcactgaaaaaaaaaaaaaaaaaaaaaaaaaaa

SEQ ID NO: 213243 - DNA, 600 bp, Canis familiaris
cttttgagtgggcaaggaagtcctagagggttgaatggatttcctagagctgtggcattgtttgtttgttggaaatcatcaagcattttcctccttctatatagagagtgaatttccaagaggactggaagattatcacagtgctgattggaggcagtgatttatgtgactactgcacagactcggtaaggggggcagccaggcctactcattgctcctgatattgaccaaaagaccttagatgtgctctctgagaacagtctctagaaccaaccctgggactgtccaaagcctgtgtgtgtgtgtgtgtgtgtgtgtgtgtgtgcgcgcgcacgtgccgtgcctcctcttaccccatgaccctcaggtttttggttctaattccatgtcccaagtggtatgaggtagcaggtggcaaatatggtgcttctgctccactcttacaatttctgagaattcaggaagtggggagatgtaaaccccagcagtaggatggaggacccacacattcaactcttaaactaaagctctggctgaaggttccagtcttctggttggcccatctttgataatagccagtaatcaactgttcaggttcta

SEQ ID NO: 213244 - DNA, 847 bp, Canis familiaris; identical to SEQ ID NO: 3137

SEQ ID NO: 213245 - DNA, 344 bp, Canis familiaris; identical to SEQ ID NO: 3138

SEQ ID NO: 213246 - DNA, 600 bp, Canis familiaris
ctgcggggacagcgacactggagggacagaggcgccctggcgaggaacttgggagacaggcaggatgggcccgattctagctcggccccttctggccctgcgacttaccctcttagactctaagtttcctcatccgttagatgaagaaaatataccatttcataataccatgaggaccagatggggggtgtgcgtgctccatctgtcccctcttctcatctatacgtgtgtgccgcgtacatccatgtgtgtgtgtgtgtgtgtgtgtgtgtgtgtatctctgtgtgcatctatacaaagcacctttgtgtgtatctcttacttacctacaacctgactaaagtccccccgggagtctaaggcagcccgtttctgataggtgcacacttgggagtcgctaacgtcttcctgattaaagggtcaaatggtgctttacacaaatcagcgaggtctctgggtgcaggaagcatgagctctatggagagaccctcaggctctctccggtgaccagtgagactcacactggaccttggaagctgagctgcattcatcacagccgcttctgcttccagagcttctcctgcttccctcaaacaagcc

SEQ ID NO: 213247 - DNA, 600 bp, Canis familiaris
cccttcctcctaaaaaaccaaacagccacaatgattactaacttggatgcggtttctgggaagaggcctgtagctcgctacataatctatcttccgtggttttttcctggtgtgggtactgccaacattttctgttctcctcagtgtttgcggaggatagagctataccactgagagaccccctccaaagccatggtctaaatgctaggtttgtttctccttgggcagttgttctcaaacctgaaggacctgcctcccttcggaggtctggtccctgtcccaggggcctctgctgggcatggtctggtgtgtgtgtgtgtgtgtgtgtgtgtgtgtgtgtgtggacagacaggctcctgccctttccaggcctattttcagttccctttcttagttaacttccctttcttggttagaaactcaaagaacataccttgaagaccaactgtccttcccctcctctgttccactgggagtgggagagagaattgagcttattgaggagcaagtgaacctatatatagtcagttcaagagggagaacctttggcagaatgtcccctaggtcctttcccgtttggtcagtgcaaggacctttctt

SEQ ID NO: 213248 - DNA, 578 bp, Canis familiaris; identical to SEQ ID NO: 3141

SEQ ID NO: 213249 - DNA, 600 bp, Canis familiaris
cagcaatctgggtactcccaatggggttggctcatccctggaaccagcaccctgtgtccacctgccaccccccaccctcagttcggaggccccctctcacttccctccacgcacggctgtgaaaggtaccccgccctgaggaaccaccgtccatccccctatcccagcccttacgcacatcggaataattctccaacctattctgacaatccatctgcatgtttgtccatgctccaatcccatgacagttggcccagccttgggacgcctgcccacaccagcatgctccccatgagccacagtgccggcccacccaccggctctagccaataccccagcctgtggtccgtgagcaatggcaccatcacgccgggagcgcagccggccgggatgtccaacgggctgggagcgcagttcttccggggctcctctgcgcacggggcgcctctcggccacgcggtcccggctccctcggcctccggatccccgctgtacgagggggcccccacggccacagacgttcccgacagccagtacgacgcctcggcccaagcccgcctcatcgcctcgtggacgcctgtgtcgccgccttccatgtag

SEQ ID NO: 213250 - DNA, 142 bp, Canis familiaris
atactgctgtggtctgggagcaaagtctttgaagagcttacggacatcgagaggcagttccacaaggccctgtacacagtccgggccttcctcaactgtgacagatattgctgtgggactcttagacatgaccaagcagaag

SEQ ID NO: 213251 - DNA, 210 bp, Canis familiaris
gccgacacaggcaagaacctagtcacccttcccaacacgacggccactgcaactctgcgcagcgacgagaccatctggctggaacctgaggttctcttctcagggcctcgtcaagcctttgagtttcctcaaatcaactatcagaagtctggcgggaagccttacacgtacgcgtatggacttggcttgaatcacttcgttccggacagg

SEQ ID NO: 213252 - DNA, 600 bp, Canis familiaris
aataaaatcctaaaaaaaaacaaaaccagaccgtgtccctatcctcatggaactggtgtcctgactccatgtgacgttctggccacaaaggaatggacagataaaaagatgatttctaagtgtaataaattcaaccactttgccatactgactaaatcacctccgttgaactcagcacgacagacccaaaagggacccgagaggccatcttgtctagtcatgttcaaagtttatttttgccgcagaacctgtttaaagggtatcttttatggtaaggggctgggatgtaggggcttcttagggccgtcagccaggagcctttcccagctgtacccagagctttggcccacagaggaaaaaccacccgcaaaagaccagagctggatggagtctgagaggccctctcaagctgtgcttcgtacatgaggtgacacaggctgttgcccccggttccatgagaaggggactgtaatatggttgtcacagtgaagaatatttgccagccctcttctgtatttgtaattacctgcctgtaattaatacacacacacacacacacacacacacacacacacacacaccctgccccttctgaagggg

SEQ ID NO: 213253 - DNA, 600 bp, Canis familiaris
ccggcagggtctcctctgacctcctaaccatccctgcataccctgactttgcatattatttgcatatacaccttttttgcatctaagacacacacacacacacacacttaaaatgatttacacacccatcctgcagagcacactcaatttgacacatggatgtggacttacaaaacctaaatgagatagaagcacaatggaaggtgcctgtcacccacggggagaagtagcacaggtgtgggaaaatccacatccacgcacacagaggagctgcgtgcgaggggacactgcagtgtcataaagagccgcaggctgtctatctggagaaacctgtagatagctccaggggcaatgaagctctgtctcggagtcctggcaaaggcccaggtccaggagtcagaagccctaggtaccccccccaccgcccccagggccctgccctctcactctgtgtgtcgcatgttggtgcctctcacctcgcccgcccgtaaattcacagactgacccggcagcctcaactcctccggctgacggggtccgtctctctcctcccctgcagctcagccaaagacccacagtggaagaacttagagaaagaaa

SEQ ID NO: 213254 - DNA, 250 bp, Canis familiaris; identical to SEQ ID NO: 3147

SEQ ID NO: 213255 - DNA, 540 bp, Canis familiaris; identical to SEQ ID NO: 3148

SEQ ID NO: 213256 - DNA, 527 bp, Canis familiaris; identical to SEQ ID NO: 3149

SEQ ID NO: 213257 - DNA, 379 bp, Canis familiaris; identical to SEQ ID NO: 3150

SEQ ID NO: 213258 - DNA, 173 bp, Canis familiaris; identical to SEQ ID NO: 3151

SEQ ID NO: 213259 - DNA, 600 bp, Canis familiaris
ccacctgtgtgacccatcggctggcaggcttgctgagcagatctgggggtgtggtgaagaacaacttcgtgcccaccaacgtggggtccgaagcctttggccggcgccgcagagaccttcgtgcctgagcagtgacatgactccgggaagtaaccatgaagctgaactcaccacttctattaatttctgttgacaacacttggtgagaaggccccatggaagatatacatgtttgcatcccaatagatactgaaaaaaagcacctttgtcatttggaaggaatgaaactgaatgcaaaataagctaatcccatacgtgttatgtattctttttatatttgattctgtgtgcggtcagtgtgatggcatctattattggcttatctggtagcaaactggttctttgagagttatcctattgatcatggcagctctgctcaaccttaggagggacaataaatcattgtctttgtggcctctgggaatacatggtaatggtaatgctttgcctggttgtctaagaacatgattgtataatttaaggaaatctcaatattgtaccatttgtgaacttcatcaagattaaaaacatattttggat

SEQ ID NO: 213260 - DNA, 422 bp, Canis familiaris
atgaaggcgctgagcccggtgcgcggctgctacgaggcggtgtgctgcctgtccgaacgcagcctggccatcgcgcgcgggcgcggcaagggcccggcggccgaggagccgctgagcctgttggacgacatgaaccactgctactcgcgcttgcgggaactcgtacccggagtcccgcgaggcactcagcttagccaggtggaaatcctgcagcgcgtcatcgactacatcctcgacctgcaggtggtcctggccgagcccgcccctggaccccccgacggcccgcatcttcccatccagacagccgagctcgctccggaactcgtgatctccaacgacaagaggagcttctgccactgacctggcagccctggcgcctccagaacgcaggtgctggcgcccgttccgcctgggaccccggg

SEQ ID NO: 213261 - DNA, 600 bp, Canis familiaris
agcgcctctgccggggccgccctgcggccgctgctgctgccgggacacggcgcccgggaagcccccagccccgggccgccggggaagcccttcgaggccgcctcggtcaagtcggagagcgccgaggacggagccgcgtggatgcaggagcccggcagatactcgccgccgccaagacatatgagccccaccacctgcaccctgcggaagcacaagaccaatcggaagccgagaacgcccttcaccacgtcgcagctcctcgccctggagcgcaagttccgccagaaacaatacctctccattgcagagcgcgcggagttctccagctctctgaacctcacagagacccaggttaaaatctggttccaaaaccgaagggccaaggcgaaaagactgcaggaggcagaactagaaaagctgaagatggctgcaaaacctatgctgccctctggcttcagccttcctttccccatcaactcgcctctgcaagcagcatccatatacggagcgtcctaccctttccatagacctgtgctccccatcccgcccgtcggactctatgcgaccccagtcggatatggcatgtaccatctatcctaa

SEQ ID NO: 213262 - DNA, 1400 bp, Canis familiaris
aaccgcaaggacatcgcccaggacatggtcctgtaccacgtgagatgcgacaaggacgaaatccagctgatcctgccaacgagggagcgcctggggaaggagcctgcggactgtgaggaggatgagctgggaatactcttgaaggaggtgctgccggggccaagcaagttcgacatctacgagttccacttctcggacctggagtgcacggagctggagctggtcaagtgcggcatccagatgtactacgagctgggcgtggtccgcaagttccagattcctcaggaggtcctggtgcgcttcctgttctccgtgagcaaagggtaccggaggatcacctaccacaactggcgccacggcttcaacgtggcccagaccatgttcacgctgctcacgacgggcaagctgaagagctactacacggacctggaggccttcgccatggtgacggcgggcctgtgccacgacatcgaccaccgcggcaccaacaacctgtaccagatgaaatcccagaaccccctggccaagctccacggctcctccatcctggagcggcaccacctggagttcgggaagttcctgctctccgaggagaccctgaacatctaccagaacctgaaccggcggcagcacgagcacgtgatccacctcatggacatagccatcatcgccaccgacctggcactctacttcaagaagaggacaatgttccagaagatcgtggatgagtctaagaactacgaggacaggaagagctgggtggagtacctgtccctggagacgacgcggaaggagatagtcatggccatgatgatgacggcgtgtgacctgtctgccatcaccaagccctgggaagtccagagcaaggttgctctgttggtggcggctgagttctgggaacaaggggacttggaaagaacagttctggatcagcagcctattccgatgatggaccggaacaaggcagccgagctccccaaactacaggttggcttcatcgacttcgtgtgcacgtttgtgtacaaggagttttcccgtttccacgaagagatcctgcccatgttcgaccgactgcagaacaacaggaaggaatggaaggccttggctgatgagtacgaggccaagctgaaggccctggaggaggagaagcagcaacaagaggacaggacgacagccaagaaagcgggcacagagatttgcaacggtggccccgcacccaagtcttccacctgctgcatcctgtgagctgctcccgggttcggacggcgcccccgcctctaagggtttgctacatgtgaggaagccccagaaaatgactaaagacaattttggatatcttgaaacttttttaagatctgtgtttttataaactcaactatgaataaagtttagtgtacctc

SEQ ID NO: 213263 - DNA, 1249 bp, Canis familiaris; identical to SEQ ID NO: 3156

SEQ ID NO: 213264 - DNA, 225 bp, Canis familiaris; identical to SEQ ID NO: 3157

SEQ ID NO: 213265 - DNA, 511 bp, Canis familiaris; identical to SEQ ID NO: 3158

SEQ ID NO: 213266 - DNA, 264 bp, Canis familiaris; identical to SEQ ID NO: 3159

SEQ ID NO: 213267 - DNA, 693 bp, Canis familiaris; identical to SEQ ID NO: 3160
  misc_feature (33)..(33): n is a, c, g, or t
  misc_feature (155)..(155): n is a, c, g, or t

SEQ ID NO: 213268 - DNA, 600 bp, Canis familiaris
  misc_feature (8)..(8): n is a, c, g, or t
  misc_feature (14)..(14): n is a, c, g, or t
gctccgtngccggngatctactgttgaataaggagtattagggtcattggttaatactttcttggaaaaaaaattagttatatccagtaaactatatcacaacaaataatataaattggttaagggtttaaatgtaaaaataatattttgtattattatagtatttatattcttggtattgggaaagttttgtaagcatggattctaaaatacaactataaagcaagtgcttatataattgactgtaatacacaaaggaaagaaggaaggaaggaaggaaggaaggaaggaaggaaggaaggaaggaaggaaggaaggaaggaaggaaggaaagggagcaaaacagaaaacaaagaaacaaaataaagtgaaaaagacacaagttttagaccaaactgaaaaagcattggcaaattttgtgttataacacaattataacaaagtgttactcttattaatataaagaaaattctttcaagtcaaatgaagtcataaacaataatagaaatagactaaagagtataaagagattattcaaaaatgatcctctagagtcgacctgcaggcatgcaagcttggcactggccgttccttttttaa

SEQ ID NO: 213269 - DNA, 892 bp, Canis familiaris; identical to SEQ ID NO: 3162
  misc_feature (15)..(15): n is a, c, g, or t
  misc_feature (24)..(24): n is a, c, g, or t
  misc_feature (780)..(780): n is a, c, g, or t
  misc_feature (876)..(876): n is a, c, g, or t
  misc_feature (882)..(882): n is a, c, g, or t

SEQ ID NO: 213270 - DNA, 600 bp, Canis familiaris
  misc_feature (550)..(550): n is a, c, g, or t
  misc_feature (568)..(568): n is a, c, g, or t
  misc_feature (571)..(571): n is a, c, g, or t
  misc_feature (574)..(574): n is a, c, g, or t
  misc_feature (581)..(581): n is a, c, g, or t
  misc_feature (585)..(585): n is a, c, g, or t
  misc_feature (588)..(588): n is a, c, g, or t
  misc_feature (597)..(597): n is a, c, g, or t
aaggaagaagagaagaggagaggagaggagaggagaggagaggagaggagaggagaagagaagagaagaagagaagagaagagagagaaagaagagaggagaagagaagagaagagaagagaagagaagagaagagaagagaagagaagagaagagaagagaagagaagagaagagaaaagagaaactttccaggagggaaggatggaagaaagaaattttcaaattagcttttgtatagaaatgaatctgttgttcaaagcaaatgacagataatgacatgcctttacatgagaagcccccatgggcccttctcaactaaatcaagggaaatgttgagtgttatggtctgaatgtttgtgttctccccaaatccatgtgtggaagccctaacccccagtgtgatggtactacaaggtggggcccttgggaagtaattaggtttagatgaggtcatgaggatgggccccatgttgggctttgtgttctcttataagaaggaagagataccagagctctttctctccaccttgtgagggtataggaagaangtggctatgtacaagccnggncangggccancatncangcctgcagntgc

SEQ ID NO: 213271 - DNA, 600 bp, Canis familiaris
  misc_feature (560)..(560): n is a, c, g, or t
  misc_feature (566)..(566): n is a, c, g, or t
  misc_feature (588)..(588): n is a, c, g, or t
  misc_feature (596)..(596): n is a, c, g, or t
ataccagcctagggaataaaaacttcaccctgttctaacaccttgagagggctaaaaccacatgaggttaggtaagagaggctttgttaggtggggccttggctggaacctaaaaggaatcatcattctattttactggagcttctaactttcagctactgtgatatatggagaaagagaggaaggaaggaaggaaggaaggaaggaaggaaggaaggaaggaaggaaggaaggaaggaaggaaggaaggaaggagaaagaggaggaaactatagtctctgctatggactgaattatgtctcccccaaatgcatatgttgaaggccctagcctcccatatgatgaaatctgaaggcagagcctttaggaggaaattaggtttagatgaagtcatagggtagagccctcaagacaagactaagtgtaagaagagacagcagagttttcttcctacctctctctcaccaccttcatgcaccttagtgcatgacctttcttcgaaaggtcacaaggacttgagaaaagcagtcatcagtacccaaggagaaagctctcctcanaaaggnactgaaccctgccagaaacctnatcccctnaatc

SEQ ID NO: 213272 - DNA, 600 bp, Canis familiaris
  misc_feature (594)..(594): n is a, c, g, or t
ctctttccatctccttctgcccctcaccccctgcaagtgcctgcccgcactctctctgtcatgctctctctctctctctcaagaaaagagagagagagaaagaaagaaagaaagaaagaaagaaagaaagaaagagaaaaaaagaaagaagaaagaaagaaagaaagaaagaaaaaaagaaagaaagaaagaagaaagaaagaaagaaagaaagaaagaaagaaagaaagaaagaaagaaagaaagaaagaaagaaagaaaaggagggaagcaaggaaggaaggaaggaaaagaaaaaagaaaagaaagaaagaaaggagagcttcagtcttctttaagtagagatggtgaacagtgaagccaactctagagcatcctgttccatctgaacaattaatggagaaaataaagtgatatcctccctcccccccccttttcatgtccttacgccctcatctcatcagtactaaagtttcagccagtcaaacaaaagtaagggaacacagtggcttcctggagctcaaagacacagctcagccttcacttgctgttgtgcaaaatgcatgagctaattataccctaagcctcctgcanagtagc

SEQ ID NO: 213273 - DNA, 600 bp, Canis familiaris
  misc_feature (89)..(89): n is a, c, g, or t
  misc_feature (188)..(188): n is a, c, g, or t
  misc_feature (190)..(190): n is a, c, g, or t
  misc_feature (193)..(193): n is a, c, g, or t
  misc_feature (220)..(221): n is a, c, g, or t
  misc_feature (275)..(275): n is a, c, g, or t
  misc_feature (548)..(549): n is a, c, g, or t
  misc_feature (551)..(551): n is a, c, g, or t
  misc_feature (582)..(582): n is a, c, g, or t
tccatctgtaggatggtctgttctctgaaaataaaccacttggctctaaatgctcagtaaacttaatttcaggggaaaggaagaaaaanggagggaaggagggagggaaggagggaaggagggaaggagggaaggaaggaaggaaggaaggaaggaaggaaggaaggaaggaaggaaggaaggaaggnantgnaaggaagggagggagggaaggaagganngttggaaggagggaaggaaggaaggaaggaaggaaggaaggaaggaaggaaganaaagaaagaaagaaagaaagaaagaaagaaagaaagaaagaaagaaagaaagaaaggaaagaaactttatgctttgctcagattcctacaaatatcatacccagcttttaataaaaattataccaacaatttctgaagcctctactgcatcaaaggaggtttgcatgtctcaatttaatcccccaaaacaacactgaaagagaggtgggttggtttgatttcgatttttaaaggaagacaactggtgttcgcaaagactagtaaattgtcctnnanaacccagattacgagcactggagcccaaaantccctgcccggtctcccg

SEQ ID NO: 213274 - DNA, 600 bp, Canis familiaris
  misc_feature (527)..(527): n is a, c, g, or t
  misc_feature (576)..(576): n is a, c, g, or t
ggggtgtggcctatgtcaccctacggtcctttggactatgtgtctgtaatagaaaatccatcctattcctcaggttttatctgctctttaaatggcagttacttcaactcctatcatgcagatgaatatatttgattacatatctgtatatgttgaggtttgtatcagactggatggatggatggatagatagatggatagatggatagatagatagatagatagatagatagatagatagatagatagacagacatggatggatagatggatggatagatggatggatggataaataaagattatagatagatgatagatactctgacatcatgccccatcacccctcaaatactcccccatgtacctcctaaaaacaagaacacactcccatgctacatggctctccaagtcaggaaatcaacactgacacagcactgccatccaacagttgttcaaatattatcaactgtctcaacagtgttccttgtcctctgccttgcgggctccaccatggagcatgcaangcgttgagttgtccatcccattagtgtccttccatctggagcaaccccngtgtctggctgctctcaaaggtct

SEQ ID NO: 213275 - DNA, 600 bp, Canis familiaris
  misc_feature (522)..(522): n is a, c, g, or t
  misc_feature (535)..(535): n is a, c, g, or t
  misc_feature (537)..(537): n is a, c, g, or t
  misc_feature (561)..(561): n is a, c, g, or t
  misc_feature (569)..(569): n is a, c, g, or t
  misc_feature (573)..(573): n is a, c, g, or t
  misc_feature (578)..(578): n is a, c, g, or t
  misc_feature (584)..(584): n is a, c, g, or t
cctacacataaaatttactactgctggcaattacataaatatctcccttacttcttgagcactcaacttacatatttataatatgttgcaatttttttcctaacttttctaagtggttgtactaaaagattttttcaacacttttttgtttctttaaatttgccatacttcagaagcagaatgtaattggaaagatggaggaaggaaggaaggaaggaaggaaggaaggaaggaaggaaggaaggaaggaaggaaggaaggaaggaaggaagaaaaaaagacatcctaaaagatgataggtttctgtatattcctctggattctcctttgtctaggtatttttaaagttccagtgtcagcctataaaaataggggagaatgtatctgagtgtagggagcctccccctgccgtatatgtcacttctccccttctattggaataaggagctatcctcccataggactgggagaggaacaatttctactatacaataagaacaactagacttacaggcagtgttntgatgtagtacangntagggaccatctcctataccttcnaacctaantagntcacngagcangcttagggtctcaaat

SEQ ID NO: 213276 - DNA, 600 bp, Canis familiaris
  misc_feature (7)..(7): n is a, c, g, or t
  misc_feature (504)..(504): n is a, c, g, or t
  misc_feature (512)..(512): n is a, c, g, or t
  misc_feature (562)..(562): n is a, c, g, or t
aagaagnaaggaaggaaggaaggaaatgtttttgcccttggtgagaactcttgggattttttttctcataacgacttttctatgtgccatagagtaatgtcagctgcagtcatcaggttgtacactaaatccccatgacttaatttattttataactggaagtgtgtaccttttgaccaccttcctccaattcccccaccccctaccctctgcctctgataaccacaagtctgatcgcttttgctatgagtttgctttttgttttgtttttagattttgcatataagtgagatagtacagtatttgtctttctgtgtctgacatgttactcagcgtgatgctctcagcatccatccatgttgtcaaaaaaggcaagatttccttctttttatggctgaataatattccattgtgtatatatactacaacctctttattcatctagccactgatgggcagtcaggtaatttccatgccttggctattgtaaataatgctgcaagnaggggcantgtaaaacgacggccagtgccaagcttgcatgcctgcaggtcgactctanaggatccccgggtaccgagcaagaattcgaatcataaa

SEQ ID NO: 213277 - DNA, 600 bp, Canis familiaris
  misc_feature (504)..(504): n is a, c, g, or t
  misc_feature (531)..(531): n is a, c, g, or t
  misc_feature (533)..(533): n is a, c, g, or t
  misc_feature (554)..(554): n is a, c, g, or t
  misc_feature (556)..(557): n is a, c, g, or t
  misc_feature (567)..(567): n is a, c, g, or t
  misc_feature (575)..(576): n is a, c, g, or t
  misc_feature (583)..(583): n is a, c, g, or t
  misc_feature (588)..(588): n is a, c, g, or t
  misc_feature (591)..(591): n is a, c, g, or t
  misc_feature (593)..(593): n is a, c, g, or t
  misc_feature (595)..(595): n is a, c, g, or t
catgaagtcactgtagcctcaaacaacagttattttcccagtaatctgtgcgttaaagtggctgtctacatgtgtgtccatgtgtgtgtgcaccagaaatccttagattcaaaaacaacactctgtactaggcctgtgtaaagaaaggacggcctaccaagcaccttctcttgggcctcaaattctcaggttcacatttcacaagagagaaaagaaagaagaaggaagaaaggaaggaaggaaggaaggaaggaaggaaggaaggaaggaaggaaggaaggaaggaaggaaggaaggaaggaaaaagaaaagaaagaaagaattggaatcttgtcaaccccaggaggactctggctccatctacatagaatatgatgcaaaaatcattagaaccatcaattcttagaatggaaggctctttctgaaagaacctggccccaaacctcaccaatttttataaacagatagagctgttctgggaattgataaatttctcagtcaaanggttaagtagaagacgaatgttctaanancaaccctgcccagtatgatcncnnggtaccgggntcttccannagtcttntaggnaanancncaggg

SEQ ID NO: 213278 - DNA, 600 bp, Canis familiaris
  misc_feature (86)..(86): n is a, c, g, or t
  misc_feature (151)..(151): n is a, c, g, or t
  misc_feature (212)..(212): n is a, c, g, or t
  misc_feature (561)..(561): n is a, c, g, or t
ttggttaaggttcatttctcaggtaggggaaccaagcatagcagggttcaaatcaaccagtaagcaaacaacatgaaagcaggacncagtatgtacaaagggctgcatttggtggagccagggttggggaaggtaaaggggaaaagctgcnaactacaagacattgtccctgcctggaagagtgccttatccccagagagaaaagatacatnaatgccaaatgggcaaacagaagtactgtactttttttttttgaagtactgtacttttacagtgacatcttatcctgcaaacaactaaagagtcatcaatttaactatatatccatgaaagaaagtaaagaaagcaatcaagagagagggagggaaggaaggggagggatggagagtaagatagagggaaggaaggaaggaaggaaggaaggaaggaaggaaagaaggagaggggaggggtagaaagaggcagggcaggggtattccactactacgttcttctgatgaggtgtctcagggggaacttgcatttctctaggggtcctcagctatcatggtcctctttagnatacagctctctctagctgagaatggatcctctagagtc

SEQ ID NO: 213279 - DNA, 600 bp, Canis familiaris
  misc_feature (47)..(47): n is a, c, g, or t
  misc_feature (52)..(52): n is a, c, g, or t
  misc_feature (68)..(68): n is a, c, g, or t
  misc_feature (211)..(211): n is a, c, g, or t
  misc_feature (517)..(517): n is a, c, g, or t
  misc_feature (521)..(521): n is a, c, g, or t
  misc_feature (530)..(530): n is a, c, g, or t
  misc_feature (564)..(564): n is a, c, g, or t
aattttacataaatatgaaattatttccaaaacagtttaaaaaatanataanagaagggacataccanaatagttctatgatatagtcttaagtcatgctgtaaatgaattcaaactcttctctgaggtgtaaatactatttctacttcatatgaggactcaactccccatccctgtagtgggactcagctccccatccctgtagtgcaantgagaaagaaaagaaagaaagaaagaaaagaaagaaaagaaaaaaagaaaacaaaagaaaagaaaagaaagaaaagaaaagaaaagaaaagaaaagaaaagaaaagaaaagagaaaagaaagaaggaaggaaggaaggaaggaaggaaggaaggaaggaaggaaggaaggaaggaaagaaagaaagaaagaaagaaagaaagaaagaaagaaagaaagaaagaaagaaagaaagaaagagagagagattgtcttttcaataagtggtgttaactgaacatctatatattaaaaagaagaagaaaantgtnaaacgacgnccagtgccaagcttgcatgcctgcaggtcgactntagaggatccccgggtaccgagctcgaattcgtaat

SEQ ID NO: 213280 - DNA, 600 bp, Canis familiaris
  misc_feature (19)..(19): n is a, c, g, or t
  misc_feature (47)..(47): n is a, c, g, or t
  misc_feature (156)..(156): n is a, c, g, or t
  misc_feature (175)..(176): n is a, c, g, or t
  misc_feature (596)..(596): n is a, c, g, or t
ttcctgcttctccctcttnctgtacctctgccttctctctgtgtctntcatgaataaataaataaaatctttaaaaaaaaaaatacaggggctcttcaagctttgcagcctcttcatgtcagctgttcgctggatggtaatcagataaagagctanaagaattacgtgaaaaaannaaagagagagggaagaaaaagaaagaaagagagaaaagaagaaagaagaaagaaagagaaagaaagaaagaaagaaagaaagaaagaaagaaagaaagaaggaaggaagggaaggaaggaaggaaggaaggaaggaaggaaggaaggaaggaaggaaagaaagaaagaaagaaaggaagaaagaaagaaagaaagaaagaaagaagagaaaagcatggcatgagttggtcctacaagaacactggctagagccttctatcagaaaatgaaataactgaatcaccttggcctaggctaaacttctcagtgtatacagtaagtgatgttaattttatgcactgcaggctttttattaagcagctgctataaaagctccttatccctcatgaaaattacaatacttaaccactaacatctcanccat

SEQ ID NO: 213281 - DNA, 600 bp, Canis familiaris
  misc_feature (390)..(390): n is a, c, g, or t
  misc_feature (398)..(398): n is a, c, g, or t
atgtttctaaaaaacactctagctataaatcccatgactttaagaaatctttccttcatcttgcaggagcttagtttccttcagaaaaataaatagaaagagggaaggaaagaaagaagaagaagaagaagaaaagaaagagaagaaagaaagaaagaaagaaagaaagaaagaaagaaagaaagaaaaaaagagagagaaagaagaaagaaggaaggaaggaaggaaggaaggaaggaaggaaggaaggaaggaaggaaggaaggaaggaaggagaaagaaagaagaaagaaagaaagaaagaaagaaagaaagaaagaaagaagaaagaaagaaagaaagaaagaaagaaagaaagaaagaaagaaagaaagaaagaaaaagaaaatnaatttaanacttgctgaacaataaattagataggtacagatattttactacagacaagttaatatataatatacatattatatataatatgacatgtaatgtatacaatatacatatttaaatgtacagttttatcatgcaaaaataatttcgtgaatgaatgattttttaaaaattcttaagattcctacttcccaaagtttggggggg

SEQ ID NO: 213282 - DNA, 402 bp, Canis familiaris; identical to SEQ ID NO: 3175

SEQ ID NO: 213283 - DNA, 600 bp, Canis familiaris
tggcgttatactggcactccaccaccgaatctttcaaagaatacaatacttgtcaagtggctgccccggaatgatctgcttggtcacccgaaggctcgcgcctttatcacacattctggctcccatggcatatatgagggaatatgcaacggcgttccaatggtgatgctgcccttgtttggtgatcagatggacaatgcgaagcgcatggagactcggggggctggagtgaccttgaatgtcctggaaatgacttctggagatttagcaaatgccctaaaagctgtcatcaatgacaaaagctataaggagaacatcatgcacctctccaggctgcacaaggaccgccccatcgagcccctggacctggctgtgttctgggtggagttcgtcatgaggcacaagggggctccccacctgcgtcccgcagcccacgacctcacctggtaccagtaccactctttggacgtgatcggcttcctcctggccgtggtgctgggggttgtcttcatcacttacaaatgttgtgcctttggctgccggaagtgctttgggaaaaaaggacgggttaagaaacctcacaaatccaaggcacactga

SEQ ID NO: 213284 - DNA, 1400 bp, Canis familiaris
ccacagcagagtctagcgaggatgaggtcgtggcaccctctcagtctctcctctcaggttatgtgacccctgggccaactctggccaactcccaggcttcaaaggccactcctaggccagacctcaacccgtcggcttcctctacttccatcagcaaagatgccccagatggcaagcaggaagtggagccccaacacgtagcaggcactgtatcccctaaaacaagcaggagagaggctgatgccacgcctcagaagccccggaagcccaagaaggaggccgggagcccccaagcctccacgctggccctgcagagcgacatcagccgacgcctcctgagtgagccctggcccctgaatgaggcccaggtccaggcctcggtggtgaaggtcttgacagagctgctggagcaggaacggaagaaggccgccgatgccgccaaggagagcaacaggaagggccgggtgggccgcaagcggaagctgtcgggggaccagacagcagccagagtccccaagagcaagaaaaagaagcagctcgtggccgggggaggtggggagggtgctgctggctcaccagaaaaggccctcaggactcccaaggggaaagccaagagagatggagcaagcagtgacatcaaggagaagaaggagaaagagtctcctggctctctagaggccaaggagaagccggaaggggagccggggacactgaaggttgaaggtggagaccaaggcaacccaaagatcaagaaggagaaaaagaaatcagataagaaaaaaaaagacaaggaaaaaaaggaaaagaagaagaaggcaaaaaaggcctcaaccaaagaccctgactcactattccagaagaaaaagaagaaaaagaagaagacagcagagcaaactgtctgaggggcacaaggcgacagggatttcttagccaagtggtgaccagccccatgcctctgccctgtgcccaccgtgggctggaactgaatctttagcttcccccgtccccagaagaggccagccagccacagtgtccacgctggccgagctagtgagccctgcagaggctggtccgaggaggaggagaagcttccagctccaatgactggcactcactgactccgcgtctgacttctgtcctgacacagaatgcttcatagagatgtgtacagtatatatatatttttttaagagacctgcccctcccccttcaaactgacactcccagaggcctcgggaccttccatcctttgacctgcagacccagcaaggcccggcctgcagctcctcccatgtccctggtctctggtctctggctgatgctgaggctttgtcctctctgtttttcacattttgtttgtggttttttgtaacaactcggaaaataaaaggcttgaagga

SEQ ID NO: 213285 - DNA, 391 bp, Canis familiaris; identical to SEQ ID NO: 3178

SEQ ID NO: 213286 - DNA, 328 bp, Canis familiaris; identical to SEQ ID NO: 3179

SEQ ID NO: 213287 - DNA, 123 bp, Canis familiaris
caatacttaaaaaagataattattcctacatatcattctacaatgctctgatacatgaagggtataaagatcttgctgcccttctccatagtggcattcctgtcatctcttcttccaacggtg

SEQ ID NO: 213288 - DNA, 160 bp, Canis familiaris
agtcctgtggcacaacacatacagcattggttcctctagatctggttaaatgcaggatgcaggagtacagttgcgaatatggctccatgaagttttatgcactgtgtggctttgggtggggtcttaagttgtggtctgacacacactgctgtcgttcctc

SEQ ID NO: 213289 - DNA, 600 bp, Canis familiaris
  misc_feature (515)..(515): n is a, c, g, or t
  misc_feature (522)..(522): n is a, c, g, or t
  misc_feature (537)..(537): n is a, c, g, or t
  misc_feature (551)..(551): n is a, c, g, or t
  misc_feature (562)..(562): n is a, c, g, or t
  misc_feature (581)..(581): n is a, c, g, or t
  misc_feature (586)..(586): n is a, c, g, or t
ggagggcccaggaacacccatacaggtggccatgacagcccccatggacaacatgaattgtctacagtggagggcaaaacatcctctgggagcttcttcctgtttctttccccagctaaccatcctgcaagaaatatttctggaatgcctccatatttaaagaagattccttgagacagtccatctttctgcgctagtgacagtagagaagtttttactttctctcagaaagcgaaaaaagggagacttttacgggaaggagagaggacttacttgctgtactaatgtgttaagtggggggaaaatttatgacttccggtgctacctggggcatgttctggggctcattgttctccagagcgttaggacatcagtcaaagaatttttgggacatataaacacgtggatcccgggtttttttgaccttttgaattattttggaaccaaaggtggatcaacttgacacatgctgggggagctagaacactttggggactgtgatcacttatccactngggatkntgaaccacttttgtngtgtgctttgrccngtataatatgntgwtaacgtgattttacgnttacnttttttttgtggag

SEQ ID NO: 213290 - DNA, 567 bp, Canis familiaris; identical to SEQ ID NO: 3183

SEQ ID NO: 213291 - DNA, 600 bp, Canis familiaris
acacggaaggaaattgttatggccatgatgatgaccgcctgtgatctctcagccatcaccaagccctgggaggtgcagagtaaggtagctctactggttgctgccgaattctgggaacaaggtgacctggagcgcacagtgctgcagcagaatcccattcccatgatggacaggaacaaggcagatgaactccccaagcttcaagtcggcttcattgactttgtttgcacctttgtctacaaggaattctcccgtttccacgaggagatcactcccatgctggatgggatcaccaacaaccgcaagagtggaaggcgctcgcgatgagtagacaccaagatgaaggcctggagaggagagcagagcagagacagaagcaaggggggagagatagccgggggaaaccagccgggggggggactcatcaagttgctgatagtaagtgcctcataggtgacgatgtacaacttctgaaggacaccaccagagaaacaaacctgtttgagtaatagtatggttgaatggaaaattagctattattgtgtttgaaattttagttaatatttatggtaacaatttgttatgatattaattataggg

SEQ ID NO: 213292 - DNA, 578 bp, Canis familiaris; identical to SEQ ID NO: 3185

SEQ ID NO: 213293 - DNA, 1400 bp, Canis familiaris
accacagcagagtctagcgaggatgaggtcgtggcaccctctcagtctctcctctcaggttatgtgacccctgggccaactctggccaactcccaggcttcaaaggccactcctaggccagacctcaacccgtcggcttcctctacttccatcagcaaagatgccccagatggcaagcaggaagtggagccccaacacgtagcaggcactgtatcccctaaaacaagcaggagagaggctgatgccacgcctcagaagccccggaagcccaagaaggaggccgggagcccccaagcctccacgctggccctgcagagcgacatcagccgacgcctcctgagtgagccctggcccctgaatgaggcccaggtccaggcctcggtggtgaaggtcttgacagagctgctggagcaggaacggaagaaggccgccgatgccgccaaggagagcaacaggaagggccgggtgggccgcaagcggaagctgtcgggggaccagacagcagccagagtccccaagagcaagaaaaagaagcagctcgtggccgggggaggtggggagggtgctgctggctcaccagaaaaggccctcaggactcccaaggggaaagccaagagagatggagcaagcagtgacatcaaggagaagaaggagaaagagtctcctggctctctagaggccaaggagaagccggaaggggagccggggacactgaaggttgaaggtggagaccaaggcaacccaaagatcaagaaggagaaaaagaaatcagataagaaaaaaaaagacaaggaaaaaaaggaaaagaagaagaaggcaaaaaaggcctcaaccaaagaccctgactcactattccagaagaaaaagaagaaaaagaagaagacagcagagcaaactgtctgaggggcacaaggcgacagggatttcttagccaagtggtgaccagccccatgcctctgccctgtgcccaccgtgggctggaactgaatctttagcttcccccgtccccagaagaggccagccagccacagtgtccacgctggccgagctagtgagccctgcagaggctggtccgaggaggaggagaagcttccagctccaatgactggcactcactgactccgcgtctgacttctgtcctgacacagaatgcttcatagagatgtgtacagtatatatatatttttttaagagacctgcccctcccccttcaaactgacactcccagaggcctcgggaccttccatcctttgacctgcagacccagcaaggcccggcctgcagctcctcccatgtccctggtctctggtctctggctgatgctgaggctttgtcctctctgtttttcacattttgtttgtggttttttgtaacaactcggaaaataaaaggcttgaagg

SEQ ID NO: 213294 - DNA, 600 bp, Canis familiaris
aaagggggatgagaagaatcttgagaatgccttgagggtagcgtgggacatggaagtacttcctaattcctcttcaggctgttgcttaactccatttcagatcattggagagtaaaaagttaatgcacatcgtggaattgatggtttctgtgaaatactaggtacaagtcattcctcacacattgcaaaggtgattgggggcggggagtgtagttaattctctgcttaaaaaaataaatatattgtaaccattacctatatgctaaatattcttgaacaatgaatagatccagaaagaaaaaaaaaaatcatgctttctctgtgtgtgtacctgttgtatgtgctaaacttattagaaaaatttatttactttttaacatgttgggggcagagggtaaagccatgttttgacttgctaaaaatggtgttgtcaaacagcccatttagctccctggtaattcatctttccatcttccccccccaacaccacccagtatacgtttatccctttgaaagggtgccttgtataattttatatattttattgaagagttatttcttatctcttattctgaattaaattaaacatttgttttattg

SEQ ID NO: 213295 - DNA, 270 bp, Canis familiaris; identical to SEQ ID NO: 3188

SEQ ID NO: 213296 - DNA, 413 bp, Canis familiaris; identical to SEQ ID NO: 3189

SEQ ID NO: 213297 - DNA, 600 bp, Canis familiaris
ttctacaggccaaattcagataatcgacgccagggtggcagagagagattggccagtaccagtgacaaaggaaacatggccatggagtctgccaaggagactcgctactgtgcagtgtgcaatgactatgcctcaggctaccattatggagtctggtcctgtgagggctgtaaggccttcttcaagagaagtattcaaggacataatgactacatgtgtccagctaccaaccagtgcacaattgataagaacaggaggaagagctgtcaggcctgtcggctgcgcaagtgctatgaagttggcatgatgaaaggcgggatacggaaagaccgaagaggaggaagaatgttgaaacacaaacgccagagagatgatggggagggcaggaatgaagtggggtcctctggagatgtgaggacttccagcctttggccaagccctctcttgattaagcatactaagaagaacagcccagccttgtccctgacagccgatcagatggtcagtgccttgttagaggctgagccccccataatctattccgactatgacccatccagacccttcagtgaagcttcgatgatgggcttgctgaccaac

SEQ ID NO: 213298 - DNA, 600 bp, Canis familiaris
gatgtaaggccttttttaaaagaagcattcaaggacataatgattacatatgcccagctacaaatcagtgtacaatagataagaatcgacgcaagagctgccaggcctgccgacttcggaagtgctatgaagtgggaatggtgaagtgtggctcccggagagaaaggtgtgggtaccgtgttatgcgaaggcagaagagttccgatgagcagctgcactgcctgagcaaagccaagaaaaatggtggccacgtgacccgagtgaaggagctgctgctgagcgccctgagcccggagcagctggtgctcacgctcctggaggccgagccgccccacgtgcttgtgagccgccccagcacgcccttcaccgaggcctccatgatgatgtccctgaccaagctggccgacaaggaactcgtgcatatgattggctgggccaagaaaattccaggctttgtggagctcagcctctgtgaccaagtgcgcctcctggagagctgctggatggaggtgctaatggtgggcctcatgtggcgctccattggccacccgggcaagctcgtctttgctccagacctcgttctggacagggatgagggga

SEQ ID NO: 213299 - DNA, 600 bp, Canis familiaris
tgcctggccagggctctgcttcggaaatccaagattctgatcatggatgaggccactgctgcggtggacctagagaccgatcacctcatccagatgaccatccaaagggagttctcccactgcacgactatcaccattgctcacaggctacacaccatcatggacagtgacaagataatagtcctagacaatgggaagattgtagagtatggcagccctcaagaactgctgagaaattcgggccccttttatttgatggccaaagaagctggcattgaaaatgtgaacagcacatcgttctgacagtaggtcccatgggctgaaaaaggactataagatcattccttatttttttgtgagagatactacacagaagtttgtaaaatatacatttttgaagaaggattgttatatccagctacagcggaccacccccaatcttgctttgatgatcccacttcaattttatctccttcatacttaccttcccagagataactaacctgaattttgtgataatgatatcctcctgcttttcattttagttttactacttggtatgtacccttaaacaagatataccttttttaatttatgtga

SEQ ID NO: 213300 - DNA, 504 bp, Canis familiaris; identical to SEQ ID NO: 3193
  misc_feature (440)..(440): n is a, c, g, or t
  misc_feature (442)..(442): n is a, c, g, or t

SEQ ID NO: 213301 - DNA, 503 bp, Canis familiaris; identical to SEQ ID NO: 3194
  misc_feature (402)..(402): n is a, c, g, or t

SEQ ID NO: 213302 - DNA, 511 bp, Canis familiaris; identical to SEQ ID NO: 3195
  misc_feature (503)..(503): n is a, c, g, or t

SEQ ID NO: 213303 - DNA, 600 bp, Canis familiaris
  misc_feature (530)..(530): n is a, c, g, or t
  misc_feature (591)..(591): n is a, c, g, or t
  misc_feature (596)..(596): n is a, c, g, or t
agcgcttacgtcccgccgccgtcgccaccatgcccaagagaaaggctgaaggggatgctaaaggagataaagccaaggtgaaggatgagccacagagaagatctgcaaggttatctgctaaacctgctcctccaaagccagagcccaagcctaaaaaggcccctgcaaagaagggagagaaggtacccaaagggaaaaaggggaaagctgatgctggcaaggatggaaataatcctgcagaaaatggagatgccaaaacagaccaggcacagaaagctgaaggtgctggagatgccaagtgaagtgtgtgcatttttgataactgtgtacttctggtgactgtacagtttgaaatactattttttatcaagttttataaaaatgcagaattttgttttactttttttttttaagctatgttgttagcacacggaacacttcattgttgttttgggggaagggcatatgtcactaataaaatatttcccaagctagattgataacgaaggaaaaacaccttccccttctanttttgaaaaacttcctcttggctccaggaagaaggatccctgatgttgaccacatgaaccnccttngtgg

SEQ ID NO: 213304 - DNA, 402 bp, Canis familiaris; identical to SEQ ID NO: 3197
  misc_feature (36)..(36): n is a, c, g, or t
  misc_feature (46)..(46): n is a, c, g, or t
  misc_feature (97)..(97): n is a, c, g, or t
  misc_feature (137)..(137): n is a, c, g, or t
  misc_feature (158)..(158): n is a, c, g, or t
  misc_feature (196)..(196): n is a, c, g, or t
  misc_feature (205)..(205): n is a, c, g, or t
  misc_feature (234)..(234): n is a, c, g, or t

SEQ ID NO: 213305 - DNA, 327 bp, Canis familiaris; identical to SEQ ID NO: 3198
  misc_feature (314)..(314): n is a, c, g, or t

SEQ ID NO: 213306 - DNA, 409 bp, Canis familiaris; identical to SEQ ID NO: 3199

SEQ ID NO: 213307 - DNA, 357 bp, Canis familiaris; identical to SEQ ID NO: 3200

SEQ ID NO: 213308 - DNA, 486 bp, Canis familiaris; identical to SEQ ID NO: 3201
  misc_feature (399)..(399): n is a, c, g, or t

SEQ ID NO: 213309 - DNA, 519 bp, Canis familiaris; identical to SEQ ID NO: 3202

SEQ ID NO: 213310 - DNA, 172 bp, Canis familiaris; identical to SEQ ID NO: 3203

SEQ ID NO: 213311 - DNA, 450 bp, Canis familiaris; identical to SEQ ID NO: 3204

SEQ ID NO: 213312 - DNA, 574 bp, Canis familiaris; identical to SEQ ID NO: 3205
  misc_feature (8)..(8): n is a, c, g, or t
  misc_feature (67)..(67): n is a, c, g, or t

SEQ ID NO: 213313 - DNA, 393 bp, Canis familiaris; identical to SEQ ID NO: 3206
  misc_feature (321)..(321): n is a, c, g, or t
  misc_feature (353)..(353): n is a, c, g, or t

SEQ ID NO: 213314 - DNA, 462 bp, Canis familiaris; identical to SEQ ID NO: 3207

SEQ ID NO: 213315 - DNA, 473 bp, Canis familiaris; identical to SEQ ID NO: 3208

SEQ ID NO: 213316 - DNA, 354 bp, Canis familiaris; identical to SEQ ID NO: 3209
  misc_feature (303)..(303): n is a, c, g, or t

SEQ ID NO: 213317 - DNA, 520 bp, Canis familiaris; identical to SEQ ID NO: 3210

SEQ ID NO: 213318 - DNA, 413 bp, Canis familiaris; identical to SEQ ID NO: 3211
  misc_feature (18)..(18): n is a, c, g, or t
  misc_feature (304)..(304): n is a, c, g, or t
  misc_feature (310)..(310): n is a, c, g, or t
  misc_feature (329)..(330): n is a, c, g, or t
  misc_feature (393)..(393): n is a, c, g, or t

SEQ ID NO: 213319 - DNA, 356 bp, Canis familiaris; identical to SEQ ID NO: 3212

SEQ ID NO: 213320 - DNA, 131 bp, Canis familiaris; identical to SEQ ID NO: 3213

SEQ ID NO: 213321 - DNA, 211 bp, Canis familiaris; identical to SEQ ID NO: 3214

SEQ ID NO: 213322 - DNA, 600 bp, Canis familiaris
cagagcggccacgggaacactggcaccagcgcctcgcccacggacccgcaccaccagggcaggttggctgcggcgcatccggaggcgcccgccttgcgcgcgccccctagcggcggcctcggaccggtgctccccgtggtcacctcggcctccaagctctcgccgcccctgctgtcctcggtggcttccctgtcggccttccccttctcctttggctcctttcacctcctgtctcccaatgcactgagcccttcggcacccacgcaggccgcaaaccttggcaagccctatagaccttgggggacggagattggagctttttaaagacccgacgctgtaggatggagggaggggaacacctaaaggcccagctgagctgggctgtggccaacatcaccttaaagtcctcagtaaaagtaaagaggagaaaaggtacacgttcagatcaattttgttgaaagactaaaggtttgttggtttactttttcttttttaatgttttttttttcttttttaaaatcaggtcccgtcttagcagtttttaaaagctagttgttaaattttgttccaaacattacattgaaatagtgagtataaacc

SEQ ID NO: 213323 - DNA, 893 bp, Canis familiaris; identical to SEQ ID NO: 3216
  misc_feature (28)..(28): n is a, c, g, or t
  misc_feature (30)..(30): n is a, c, g, or t
  misc_feature (36)..(36): n is a, c, g, or t
  misc_feature (72)..(72): n is a, c, g, or t
  misc_feature (110)..(110): n is a, c, g, or t
  misc_feature (112)..(112): n is a, c, g, or t
  misc_feature (120)..(120): n is a, c, g, or t
  misc_feature (152)..(152): n is a, c, g, or t
  misc_feature (154)..(154): n is a, c, g, or t
  misc_feature (156)..(156): n is a, c, g, or t
  misc_feature (206)..(206): n is a, c, g, or t
  misc_feature (219)..(219): n is a, c, g, or t
  misc_feature (246)..(246): n is a, c, g, or t
  misc_feature (271)..(271): n is a, c, g, or t
  misc_feature (286)..(286): n is a, c, g, or t
  misc_feature (384)..(385): n is a, c, g, or t
  misc_feature (387)..(387): n is a, c, g, or t
  misc_feature (399)..(399): n is a, c, g, or t
  misc_feature (414)..(414): n is a, c, g, or t
  misc_feature (419)..(419): n is a, c, g, or t
  misc_feature (457)..(457): n is a, c, g, or t
  misc_feature (481)..(481): n is a, c, g, or t
  misc_feature (496)..(496): n is a, c, g, or t
  misc_feature (837)..(837): n is a, c, g, or t

SEQ ID NO: 213324 - DNA, 439 bp, Canis familiaris; identical to SEQ ID NO: 3217
  misc_feature (103)..(103): n is a, c, g, or t
  misc_feature (112)..(112): n is a, c, g, or t
  misc_feature (192)..(192): n is a, c, g, or t
  misc_feature (393)..(393): n is a, c, g, or t

SEQ ID NO: 213325 - DNA, 588 bp, Canis familiaris; identical to SEQ ID NO: 3218
  misc_feature (168)..(168): n is a, c, g, or t
  misc_feature (170)..(170): n is a, c, g, or t
  misc_feature (312)..(312): n is a, c, g, or t
  misc_feature (371)..(371): n is a, c, g, or t
  misc_feature (391)..(391): n is a, c, g, or t
  misc_feature (398)..(398): n is a, c, g, or t
  misc_feature (431)..(431): n is a, c, g, or t
  misc_feature (460)..(460): n is a, c, g, or t
  misc_feature (523)..(523): n is a, c, g, or t
  misc_feature (552)..(552): n is a, c, g, or t
  misc_feature (588)..(588): n is a, c, g, or t

SEQ ID NO: 213326 - DNA, 600 bp, Canis familiaris
tggagcacatgatcagccccatcgctgtgcagccagacccagccagtgccgccgccgccgccgctgccgccgccgccgccgtcatccctgccgtgtccacgccgccacctttccagggccggcccatcactccggtgtacacggtggcgcccaacgtgcagaggattcccgcggccgggctctacggggccgggtacgtcccgttcgcggcgcccgccaccgccacgctcgccacactacagaagaacgcggcggccgccgccgtgtacgggggctacgcgggctacatacctcaggccttccccgccgccaccatccaggtgccgatccacgacgtctacccgacgtactgacccggcggggcgcgcggaggccgcggaggccgcggaggccgggcccagccaccccgccgcgggacactgtgctatgtatgaagaaccaacgtgccgcgggagcacgcctcggaaacccgaaagtgaagaatgttgtcagacatcatcccgaaaagattttatattcatgaagttttcactagttttgttgtcgttgtcgttttgtcttttcgtttttgtttttttaagactattttcaacgtagcgg

SEQ ID NO: 213327 - DNA, 453 bp, Canis familiaris; identical to SEQ ID NO: 3220

SEQ ID NO: 213328 - DNA, 600 bp, Canis familiaris
gtgagaaagccttcagtgcacgtttatcccttatccaacacaagagaattcacacaggggagaaaccttacaaatgcactgaatgtggaaaatccttccgacaaagctctcaccttattcgacatcagagagttcacagtggagagcgaccttatatgtgtaatgaatgtgggaaaacttttagccagagaataactcttactagtcatgagaaaactcacaccagagagcaagcctataagtgtgttaaacgtgaggacctcttaactgcacagtcagcttccattcagcaccataaagttcacaatggagaataacatctttattcaataaagtcttcactattttacatcaggagcagtatactgatgggaagccatcacttttacagctttcattttggagatttatctcttaagtgatttaacagtctcccagtgcactgttaactaaaagcaagatgccaaaatatgtggcaaaaattccaaggtcacatgccatcccttagattcagagggtggatctatgcttgagtattttaaaggatcacaatttaattacacttactcaagattgtgttttcatagcaccagactttaa

SEQ ID NO: 213329 - DNA, 600 bp, Canis familiaris
  misc_feature (61)..(61): n is a, c, g, or t
  misc_feature (77)..(77): n is a, c, g, or t
  misc_feature (137)..(137): n is a, c, g, or t
  misc_feature (148)..(148): n is a, c, g, or t
  misc_feature (166)..(166): n is a, c, g, or t
  misc_feature (168)..(169): n is a, c, g, or t
  misc_feature (232)..(232): n is a, c, g, or t
ccaaattatcggtaaggagtatacaagtatctaagcaacagcattcagccaacttcaccangttgacgtttacagancatggcacccaacatgcaagatactcatttcccttcaaatgtacgtggaatatcttcacnacgatcgatcnatggcatggccactgggnannaagggtctcaagtgatgtcagcaagacagaaggctagaaggtctcagggcttgttttcccganaaaaataagaacaagggaaaaacaactacacactgatgcaaagagctatgaccacgctccagagtacaagcaagcagcagcaaaaaccccagggagtacaaacaccaaaaatggacacatagaaaagcacacctctctctgtttgaagacaatgcagagctctttccccccaagacaacgtgtgctgaaccgggagctgcctccacccaccctcctgtctcggcctgtagctagcttaagtcacagcataatccagccaggaaaggggaaggaaaactggacccccagggagagggaagatgcaggacccacaggactgtgctggggaccagacttggggagtctgaacaagggggctggggcaccag

SEQ ID NO: 213330 - DNA, 282 bp, Canis familiaris; identical to SEQ ID NO: 3223
  misc_feature (1)..(1): n is a, c, g, or t
  misc_feature (8)..(8): n is a, c, g, or t
  misc_feature (32)..(32): n is a, c, g, or t
  misc_feature (186)..(186): n is a, c, g, or t
  misc_feature (243)..(243): n is a, c, g, or t

SEQ ID NO: 213331 - DNA, 355 bp, Canis familiaris; identical to SEQ ID NO: 3224
  misc_feature (26)..(26): n is a, c, g, or t
  misc_feature (48)..(48): n is a, c, g, or t
  misc_feature (257)..(257): n is a, c, g, or t
  misc_feature (283)..(283): n is a, c, g, or t
  misc_feature (309)..(309): n is a, c, g, or t
  misc_feature (313)..(313): n is a, c, g, or t

SEQ ID NO: 213332 - DNA, 600 bp, Canis familiaris
  misc_feature (118)..(118): n is a, c, g, or t
  misc_feature (466)..(466): n is a, c, g, or t
  misc_feature (545)..(545): n is a, c, g, or t
  misc_feature (557)..(557): n is a, c, g, or t
taggtcagcaccaggaaagaaaagatgactgcattagactctggaagccaatgcaacggcttgcaagtttagcactgtaagtacggtacaccgtgaatcatgtctgctgatgcaacancccctgggaaaggcaggggccccgagacagacactaataacaatgcaaagtcattcatgcttttattgttcaattataatgagtccactcatcacggtaataataataatgatgtgtttgaataacataattgcttaatagccattccttaccaccaccaccaccactaccccctaccattaggataaaactaaaataatctagagtatttatcattctaaaagaggatgaaaaaattggttttctgtattagcagcttttaagaattaaattatatatgggatccagttacttctgcagctttaaagggggagcttttcacctaaggtagcaagattgcataggggntaatttttttttttttcaggaaaatcccttccatattaatggaatctccttcatggaattcaagaggtctctgggcctnagttttgacgtncctggtgggcaatcaagatgacatttgtggttctgaaatccag

SEQ ID NO: 213333 - DNA, 502 bp, Canis familiaris; identical to SEQ ID NO: 3226
  misc_feature (145)..(145): n is a, c, g, or t
  misc_feature (395)..(395): n is a, c, g, or t
  misc_feature (427)..(427): n is a, c, g, or t
  misc_feature (442)..(442): n is a, c, g, or t
  misc_feature (485)..(485): n is a, c, g, or t
  misc_feature (495)..(495): n is a, c, g, or t

SEQ ID NO: 213334 - DNA, 426 bp, Canis familiaris; identical to SEQ ID NO: 3227
  misc_feature (1)..(1): n is a, c, g, or t
  misc_feature (96)..(96): n is a, c, g, or t
  misc_feature (136)..(136): n is a, c, g, or t
  misc_feature (293)..(293): n is a, c, g, or t

SEQ ID NO: 213335 - DNA, 475 bp, Canis familiaris; identical to SEQ ID NO: 3228
  misc_feature (48)..(48): n is a, c, g, or t
  misc_feature (197)..(197): n is a, c, g, or t
  misc_feature (344)..(344): n is a, c, g, or t
  misc_feature (351)..(351): n is a, c, g, or t
  misc_feature (378)..(378): n is a, c, g, or t
  misc_feature (393)..(393): n is a, c, g, or t
  misc_feature (398)..(398): n is a, c, g, or t
  misc_feature (424)..(424): n is a, c, g, or t
  misc_feature (427)..(427): n is a, c, g, or t
  misc_feature (435)..(435): n is a, c, g, or t
  misc_feature (442)..(442): n is a, c, g, or t
  misc_feature (470)..(470): n is a, c, g, or t

SEQ ID NO: 213336 - DNA, 600 bp, Canis familiaris
  misc_feature (179)..(179): n is a, c, g, or t
  misc_feature (190)..(190): n is a, c, g, or t
  misc_feature (195)..(195): n is a, c, g, or t
  misc_feature (210)..(210): n is a, c, g, or t
  misc_feature (229)..(229): n is a, c, g, or t
  misc_feature (232)..(232): n is a, c, g, or t
  misc_feature (242)..(242): n is a, c, g, or t
  misc_feature (257)..(257): n is a, c, g, or t
  misc_feature (262)..(262): n is a, c, g, or t
  misc_feature (268)..(268): n is a, c, g, or t
  misc_feature (294)..(294): n is a, c, g, or t
  misc_feature (297)..(298): n is a, c, g, or t
  misc_feature (300)..(300): n is a, c, g, or t
  misc_feature (323)..(323): n is a, c, g, or t
  misc_feature (392)..(392): n is a, c, g, or t
  misc_feature (427)..(427): n is a, c, g, or t
  misc_feature (526)..(526): n is a, c, g, or t
  misc_feature (529)..(529): n is a, c, g, or t
  misc_feature (556)..(556): n is a, c, g, or t
  misc_feature (568)..(568): n is a, c, g, or t
actaatctgaaacactgtttaccaagtagcattttaaatgaaagatacaagaaattgcatcactcacattttaaaaatgactttcgactctgggacctcataaaaaacagccgacagtgttctctgtcttgggctgctatatttcagtccagtgaatgaaattcaattagtgagctttngtacttagggncattnatgattctgatgggnkgctctggakcaaaaactngkngtgccaargnccctarwbctgttgnktttnkttttnttttttttttgcagactgcagttaanggnncngagcggtggtggtggtgaagaancccaatagggcaggttggcatgaagaaagttagttttcggagcagcttacttttcaccatcatcagaanataggggaggaggagagctgttccccagaacagcncattatttactaagtgcatggattaactttttgagaaacctcaatgcttctgtccgtcattaccagttttagtactttcccaaaatagcaatcagcctnaanccaaccagttagcgggctactaccaangcattccagatntaattcgttcttaggttttgatctgcctcaga

SEQ ID NO: 213337 - DNA, 600 bp, Canis familiaris
gagcagggaccccagtgcagggctggatcccaggatcatgacctgagccaaagcaggatacttaaccaactgagccacccaggtgcccccagagtataactcagtagaaaggatggtttaagaacaacccaacaacaacaacaacaaaaaataaggacaacccaacagatcccccctgcccacagtaggagggtcctcaccatctgactgctggctggtagagactctttcccacctggactttgtggggttccctagagggaccaccatcctgcccatcttggtgtcttgctgagaccctgctcacctggaagtcctgctcactggcaatactggctcggaggcagcgctcaaaagggcaactataaagctcagtcttcacttaagagtttcaaaaaatgcttcctgaagtgaaaagttcaaatatgaaaggcctactttctatattgttacctcagctcctttaaaatgcatactttctagtttatcttgctgattttctatacagacaactctcaattaatcccctaaatccaaactagcaatgtttcacacacgcttcattcacactgaggcataaatgactagtggcctacccag

SEQ ID NO: 213338 - DNA, 280 bp, Canis familiaris; identical to SEQ ID NO: 3231
  misc_feature (106)..(106): n is a, c, g, or t
  misc_feature (110)..(110): n is a, c, g, or t
  misc_feature (200)..(200): n is a, c, g, or t
  misc_feature (206)..(206): n is a, c, g, or t
  misc_feature (251)..(251): n is a, c, g, or t
  misc_feature (263)..(263): n is a, c, g, or t

SEQ ID NO: 213339 - DNA, 300 bp, Canis familiaris; identical to SEQ ID NO: 3232
  misc_feature (5)..(5): n is a, c, g, or t
  misc_feature (12)..(12): n is a, c, g, or t
  misc_feature (16)..(16): n is a, c, g, or t
  misc_feature (22)..(22): n is a, c, g, or t
  misc_feature (27)..(27): n is a, c, g, or t
  misc_feature (32)..(32): n is a, c, g, or t
  misc_feature (105)..(105): n is a, c, g, or t
  misc_feature (189)..(189): n is a, c, g, or t
  misc_feature (206)..(206): n is a, c, g, or t
  misc_feature (246)..(246): n is a, c, g, or t

SEQ ID NO: 213340 - DNA, 379 bp, Canis familiaris; identical to SEQ ID NO: 3233
  misc_feature (323)..(323): n is a, c, g, or t
  misc_feature (356)..(356): n is a, c, g, or t

SEQ ID NO: 213341 - DNA, 429 bp, Canis familiaris; identical to SEQ ID NO: 3234
  misc_feature (1)..(1): n is a, c, g, or t
  misc_feature (9)..(9): n is a, c, g, or t
  misc_feature (352)..(352): n is a, c, g, or t
  misc_feature (381)..(381): n is a, c, g, or t
  misc_feature (396)..(396): n is a, c, g, or t
  misc_feature (404)..(404): n is a, c, g, or t
  misc_feature (419)..(419): n is a, c, g, or t
  misc_feature (426)..(426): n is a, c, g, or t
  misc_feature (428)..(428): n is a, c, g, or t

SEQ ID NO: 213342 - DNA, 454 bp, Canis familiaris; identical to SEQ ID NO: 3235
  misc_feature (20)..(20): n is a, c, g, or t
  misc_feature (27)..(28): n is a, c, g, or t
  misc_feature (60)..(60): n is a, c, g, or t
  misc_feature (63)..(63): n is a, c, g, or t
  misc_feature (76)..(76): n is a, c, g, or t
  misc_feature (131)..(131): n is a, c, g, or t
  misc_feature (383)..(383): n is a, c, g, or t
  misc_feature (449)..(449): n is a, c, g, or t

SEQ ID NO: 213343 - DNA, 240 bp, Canis familiaris; identical to SEQ ID NO: 3236
  misc_feature (1)..(1): n is a, c, g, or t
  misc_feature (96)..(96): n is a, c, g, or t
  misc_feature (201)..(201): n is a, c, g, or t
  misc_feature (216)..(216): n is a, c, g, or t

SEQ ID NO: 213344 - DNA, 354 bp, Canis familiaris; identical to SEQ ID NO: 3237
  misc_feature (3)..(3): n is a, c, g, or t
  misc_feature (5)..(5): n is a, c, g, or t
  misc_feature (17)..(17): n is a, c, g, or t
  misc_feature (26)..(26): n is a, c, g, or t
  misc_feature (30)..(30): n is a, c, g, or t
  misc_feature (39)..(39): n is a, c, g, or t
  misc_feature (47)..(47): n is a, c, g, or t
  misc_feature (57)..(57): n is a, c, g, or t
  misc_feature (79)..(79): n is a, c, g, or t
  misc_feature (114)..(114): n is a, c, g, or t
  misc_feature (136)..(136): n is a, c, g, or t
  misc_feature (143)..(143): n is a, c, g, or t
  misc_feature (147)..(147): n is a, c, g, or t
  misc_feature (180)..(180): n is a, c, g, or t
  misc_feature (249)..(249): n is a, c, g, or t
  misc_feature (261)..(261): n is a, c, g, or t
  misc_feature (282)..(282): n is a, c, g, or t
  misc_feature (289)..(289): n is a, c, g, or t
  misc_feature (293)..(293): n is a, c, g, or t
  misc_feature (328)..(328): n is a, c, g, or t
  misc_feature (332)..(332): n is a, c, g, or t
  misc_feature (334)..(334): n is a, c, g, or t

SEQ ID NO: 213345 - DNA, 600 bp, Canis familiaris
  misc_feature (10)..(10): n is a, c, g, or t
  misc_feature (142)..(142): n is a, c, g, or t
  misc_feature (215)..(215): n is a, c, g, or t
  misc_feature (265)..(266): n is a, c, g, or t
  misc_feature (278)..(278): n is a, c, g, or t
  misc_feature (282)..(282): n is a, c, g, or t
  misc_feature (286)..(286): n is a, c, g, or t
  misc_feature (289)..(289): n is a, c, g, or t
  misc_feature (291)..(291): n is a, c, g, or t
  misc_feature (350)..(350): n is a, c, g, or t
  misc_feature (415)..(415): n is a, c, g, or t
  misc_feature (434)..(434): n is a, c, g, or t
  misc_feature (436)..(436): n is a, c, g, or t
  misc_feature (481)..(481): n is a, c, g, or t
  misc_feature (499)..(499): n is a, c, g, or t
  misc_feature (509)..(509): n is a, c, g, or t
  misc_feature (513)..(513): n is a, c, g, or t
  misc_feature (526)..(526): n is a, c, g, or t
  misc_feature (533)..(533): n is a, c, g, or t
  misc_feature (550)..(550): n is a, c, g, or t
  misc_feature (568)..(568): n is a, c, g, or t
  misc_feature (573)..(573): n is a, c, g, or t
  misc_feature (590)..(590): n is a, c, g, or t
tgattcagtngctctgggatggggcctgagaatgtgcatttcagacaggttcccagatgatgccgctgctgccggtctgcggacactgcgaggaagcacggcactgagacagcccttgcgagcgggttgggaggtaggaatnggcagcccgggtttagctctccttgtgtgggcagagttaatgttgtcgggggcgcacatacgcacaggctgtnaggcctgtcttcacaggtacatgctgctgctggtggtgctggtgctggtnnctggtggtggtngttngtgntgntnctggtggtggtttctagcagatgagaaatcagccccagtaggtagtaaatttgagaganagagactgtgtcctggttggagtgagcaccatagctacggtggagttgggcccttaatgaagagnagaaagattatataagatntntcataagtatttggtagaagcagattgtactcagttttatttatnttttattctttaaaggtnttttatttantcantcatgagagatanagagagncatagagagagggagangcagctctgcaggagccnccagnggaaagtagaccacgtnacatcttcag

SEQ ID NO: 213346 - DNA, 600 bp, Canis familiaris
  misc_feature (75)..(75): n is a, c, g, or t
cagcctaactagaagccagaacctcagacagtagctaggaaggtacacaatcaagtgccttctagggagaaactnggaggtgaatgtttgcctcttccttctgtgctgagctggggaagtgagagctgcaaaagtgcttgtgtgcccatttaaaaagtacttttttgttgttgttgttgttgtgttgttgttgtttaatatgaccctatgagatttgtaaatgccaagccctggtaactattagttaggtgacttgagaacctgttccttgagtggcaactacaaaatttggagcaccttatgtgtggacagtttctttcccagggaaaaggttgcaacttggtttgttttttattattgaagtgagttagagggggaatatgggacaagtgcccaccagctctttaggtctccttggaggatcccagtcaatacccagatgcaaactgattagaagccagaccctcaggcagcagctgggaaattctgcactcaaactctcttccagggaaaaactgggagatgggcacctttgcctgctccatctgcactgagccatggggaataggtgggaggagtgttcatgtgcctgtttaacag

SEQ ID NO: 213347 - DNA, 251 bp, Canis familiaris; identical to SEQ ID NO: 3240
  misc_feature (3)..(3): n is a, c, g, or t
  misc_feature (14)..(14): n is a, c, g, or t
  misc_feature (17)..(17): n is a, c, g, or t
  misc_feature (33)..(33): n is a, c, g, or t
  misc_feature (54)..(54): n is a, c, g, or t
  misc_feature (85)..(85): n is a, c, g, or t
  misc_feature (122)..(122): n is a, c, g, or t
  misc_feature (133)..(133): n is a, c, g, or t
  misc_feature (176)..(176): n is a, c, g, or t
  misc_feature (183)..(183): n is a, c, g, or t

SEQ ID NO: 213348 - DNA, 354 bp, Canis familiaris; identical to SEQ ID NO: 3241
  misc_feature (1)..(1): n is a, c, g, or t
  misc_feature (5)..(5): n is a, c, g, or t
  misc_feature (9)..(9): n is a, c, g, or t
  misc_feature (39)..(39): n is a, c, g, or t
  misc_feature (41)..(41): n is a, c, g, or t
  misc_feature (46)..(46): n is a, c, g, or t
  misc_feature (50)..(50): n is a, c, g, or t
  misc_feature (60)..(61): n is a, c, g, or t
  misc_feature (78)..(78): n is a, c, g, or t
  misc_feature (81)..(81): n is a, c, g, or t
  misc_feature (86)..(86): n is a, c, g, or t
  misc_feature (174)..(174): n is a, c, g, or t
  misc_feature (177)..(177): n is a, c, g, or t
  misc_feature (183)..(183): n is a, c, g, or t
  misc_feature (188)..(188): n is a, c, g, or t
  misc_feature (192)..(192): n is a, c, g, or t
  misc_feature (215)..(215): n is a, c, g, or t
  misc_feature (229)..(229): n is a, c, g, or t
  misc_feature (239)..(239): n is a, c, g, or t
  misc_feature (271)..(272): n is a, c, g, or t
  misc_feature (295)..(295): n is a, c, g, or t
  misc_feature (303)..(303): n is a, c, g, or t
  misc_feature (338)..(338): n is a, c, g, or t
  misc_feature (348)..(348): n is a, c, g, or t

SEQ ID NO: 213349 - DNA, 524 bp, Canis familiaris; identical to SEQ ID NO: 3242
  misc_feature (11)..(11): n is a, c, g, or t
  misc_feature (20)..(20): n is a, c, g, or t
  misc_feature (31)..(31): n is a, c, g, or t
  misc_feature (64)..(64): n is a, c, g, or t
  misc_feature (99)..(99): n is a, c, g, or t
  misc_feature (118)..(118): n is a, c, g, or t
  misc_feature (120)..(120): n is a, c, g, or t
  misc_feature (177)..(177): n is a, c, g, or t
  misc_feature (186)..(186): n is a, c, g, or t
  misc_feature (235)..(235): n is a, c, g, or t
  misc_feature (298)..(298): n is a, c, g, or t
  misc_feature (488)..(488): n is a, c, g, or t
  misc_feature (491)..(491): n is a, c, g, or t
  misc_feature (500)..(500): n is a, c, g, or t
  misc_feature (502)..(504): n is a, c, g, or t
  misc_feature (507)..(507): n is a, c, g, or t

SEQ ID NO: 213350 - DNA, 600 bp, Canis familiaris
  misc_feature (96)..(96): n is a, c, g, or t
  misc_feature (103)..(103): n is a, c, g, or t
  misc_feature (120)..(120): n is a, c, g, or t
  misc_feature (159)..(159): n is a, c, g, or t
  misc_feature (180)..(180): n is a, c, g, or t
  misc_feature (227)..(228): n is a, c, g, or t
  misc_feature (230)..(230): n is a, c, g, or t
  misc_feature (245)..(245): n is a, c, g, or t
  misc_feature (585)..(585): n is a, c, g, or t
gctgcataaccataaggtgttaagaacattttcttctaaaccagaacttctgagtctatcaacaaactgtacatatgtttaaattataccatatgncaacagnatgggaaggaagagggngatttttaagaagctggaaaaattagtgctcaaaatcgncaaagggttattatgtaagtncaacatatgtgcaatgagtttaaagatgggtcctctattctcaaggnngncctcctatactcaanggaggaggagacagttgcagttcatagctctctgttcactcagaaacttgggtgtttccatcaatttaataaagtattaactggtacatctccacatctactgaaaatacattatatattaagcactaccttcccaaaacaaattcacatatatgttttttagataactactttagtagcctcctcaaaaacgctgtactgcctacactgaacagagatccctccgtgagaggaacaaacctatcacactgcacacacacacacacacacacacacaccactggattgcaaatactgtgttaagtctcacaaagaaacggcatgtagtcatcaagcttancgataccgtcgacct

SEQ ID NO: 213351 - DNA, 472 bp, Canis familiaris; identical to SEQ ID NO: 3244
  misc_feature (81)..(81): n is a, c, g, or t
  misc_feature (175)..(175): n is a, c, g, or t
  misc_feature (221)..(221): n is a, c, g, or t
  misc_feature (304)..(304): n is a, c, g, or t
  misc_feature (339)..(339): n is a, c, g, or t
  misc_feature (349)..(349): n is a, c, g, or t
  misc_feature (353)..(353): n is a, c, g, or t
  misc_feature (356)..(356): n is a, c, g, or t
  misc_feature (386)..(386): n is a, c, g, or t
  misc_feature (416)..(416): n is a, c, g, or t
  misc_feature (428)..(428): n is a, c, g, or t
  misc_feature (448)..(448): n is a, c, g, or t
  misc_feature (459)..(459): n is a, c, g, or t

SEQ ID NO: 213352 - DNA, 460 bp, Canis familiaris; identical to SEQ ID NO: 3245
  misc_feature (3)..(3): n is a, c, g, or t
  misc_feature (70)..(70): n is a, c, g, or t
  misc_feature (398)..(398): n is a, c, g, or t
  misc_feature (434)..(434): n is a, c, g, or t
  misc_feature (442)..(442): n is a, c, g, or t
  misc_feature (452)..(452): n is a, c, g, or t
  misc_feature (457)..(457): n is a, c, g, or t

SEQ ID NO: 213353 - DNA, 372 bp, Canis familiaris; identical to SEQ ID NO: 3246
  misc_feature (78)..(78): n is a, c, g, or t
  misc_feature (271)..(271): n is a, c, g, or t
  misc_feature (279)..(279): n is a, c, g, or t
  misc_feature (308)..(308): n is a, c, g, or t
  misc_feature (349)..(349): n is a, c, g, or t
  misc_feature (367)..(367): n is a, c, g, or t

SEQ ID NO: 213354 - DNA, 600 bp, Canis familiaris
  misc_feature (18)..(18): n is a, c, g, or t
  misc_feature (23)..(23): n is a, c, g, or t
  misc_feature (42)..(42): n is a, c, g, or t
  misc_feature (102)..(102): n is a, c, g, or t
  misc_feature (105)..(105): n is a, c, g, or t
  misc_feature (141)..(141): n is a, c, g, or t
  misc_feature (157)..(157): n is a, c, g, or t
  misc_feature (161)..(161): n is a, c, g, or t
  misc_feature (163)..(163): n is a, c, g, or t
  misc_feature (165)..(165): n is a, c, g, or t
  misc_feature (192)..(192): n is a, c, g, or t
  misc_feature (564)..(569): n is a, c, g, or t
  misc_feature (571)..(572): n is a, c, g, or t
  misc_feature (575)..(575): n is a, c, g, or t
  misc_feature (580)..(580): n is a, c, g, or t
tccaaaaaaaaaaaaaancagantccagacatcctgtaagangtcctttacaattttcctgataggaagtaaagatgttcgtaactagagcagtggcaaggngancagtgtattcatcagggttctccagagaaacagagnccgataggaaatacanacanananacacacacacacacacacacacacacncatgcacgtgtgcgcgcaaacatgcagagacagagaaagagattgacagattgattcactgaaggaattagcttacatgagtgtggtggcccagaagcccataatctgccctctgcaagctggacttccaggaaagctgatgtctgaaagcctgaaaactaagagctctgataaacatccagctcaagaaaagagaaagagaatttgtgtttcctctgcctttttgttctatttggatcctcatggattgaataatgtcccacctaaattggtgagggcatatcttctttactcagtctggtgattcatatgctaatgttttccagaagcatactcaaagacacactcagaaacaatgttttaccagctctnnnnnnanntgngaagncacaggcacagatcaagctt

SEQ ID NO: 213355 - DNA, 400 bp, Canis familiaris; identical to SEQ ID NO: 3248
  misc_feature (12)..(12): n is a, c, g, or t
  misc_feature (346)..(346): n is a, c, g, or t
  misc_feature (362)..(362): n is a, c, g, or t
  misc_feature (377)..(377): n is a, c, g, or t
  misc_feature (382)..(382): n is a, c, g, or t
  misc_feature (393)..(393): n is a, c, g, or t

SEQ ID NO: 213356 - DNA, 379 bp, Canis familiaris; identical to SEQ ID NO: 3249
  misc_feature (13)..(13): n is a, c, g, or t
  misc_feature (70)..(70): n is a, c, g, or t
  misc_feature (73)..(73): n is a, c, g, or t
  misc_feature (277)..(277): n is a, c, g, or t

SEQ ID NO: 213357 - DNA, 348 bp, Canis familiaris; identical to SEQ ID NO: 3250
  misc_feature (92)..(92): n is a, c, g, or t
  misc_feature (94)..(94): n is a, c, g, or t
  misc_feature (112)..(112): n is a, c, g, or t
  misc_feature (114)..(114): n is a, c, g, or t
  misc_feature (135)..(135): n is a, c, g, or t
  misc_feature (137)..(137): n is a, c, g, or t
  misc_feature (152)..(152): n is a, c, g, or t
  misc_feature (333)..(333): n is a, c, g, or t
  misc_feature (342)..(342): n is a, c, g, or t
  misc_feature (346)..(346): n is a, c, g, or t

SEQ ID NO: 213358 - DNA, 350 bp, Canis familiaris; identical to SEQ ID NO: 3251
  misc_feature (30)..(30): n is a, c, g, or t
  misc_feature (62)..(62): n is a, c, g, or t
  misc_feature (315)..(315): n is a, c, g, or t
  misc_feature (320)..(320): n is a, c, g, or t
  misc_feature (330)..(330): n is a, c, g, or t
  misc_feature (333)..(334): n is a, c, g, or t
  misc_feature (341)..(341): n is a, c, g, or t
  misc_feature (344)..(344): n is a, c, g, or t
  misc_feature (346)..(347): n is a, c, g, or t

SEQ ID NO: 213359 - DNA, 452 bp, Canis familiaris; identical to SEQ ID NO: 3252
  misc_feature (19)..(19): n is a, c, g, or t
  misc_feature (175)..(175): n is a, c, g, or t
  misc_feature (434)..(434): n is a, c, g, or t

SEQ ID NO: 213360 - DNA, 355 bp, Canis familiaris; identical to SEQ ID NO: 3253
  misc_feature (51)..(51): n is a, c, g, or t
  misc_feature (236)..(236): n is a, c, g, or t
  misc_feature (240)..(240): n is a, c, g, or t
  misc_feature (244)..(244): n is a, c, g, or t
  misc_feature (259)..(259): n is a, c, g, or t
  misc_feature (319)..(319): n is a, c, g, or t
  misc_feature (331)..(331): n is a, c, g, or t
  misc_feature (340)..(340): n is a, c, g, or t
  misc_feature (343)..(343): n is a, c, g, or t

SEQ ID NO: 213361 - DNA, 600 bp, Canis familiaris
  misc_feature (116)..(116): n is a, c, g, or t
  misc_feature (209)..(209): n is a, c, g, or t
  misc_feature (211)..(211): n is a, c, g, or t
  misc_feature (215)..(215): n is a, c, g, or t
  misc_feature (276)..(276): n is a, c, g, or t
  misc_feature (556)..(556): n is a, c, g, or t
  misc_feature (558)..(561): n is a, c, g, or t
  misc_feature (567)..(567): n is a, c, g, or t
  misc_feature (573)..(573): n is a, c, g, or t
  misc_feature (577)..(577): n is a, c, g, or t
gccaggagtgatacatcagtgggaaactgcacaccttgggtgccagaggggcctggggctggggctcatggaccctggctgaagccctaacagatgggaggtgaagctgagctctnatccctggcgctatgcttggtctctaggggccccacaatccccaggaggagaacctgggccaggaaaagcaaaagcagggcagcccgggtggntnagtnggctcagtggtttagcgcccctttggcccagggcaatgatcctggagacccgggatcgagncccacatctggctccctgcatggcgcctgcttctccctctgcctgtgtctctgcctctctctctctctctctctctgtgtgtgtgtgtgtatgtgtgatgaatgaataaataaaatcttaaagaaagaaaagaaaagttggacattggagtggcatgcaaatgcctatagatctccctaagggtgctcagtgcatccccagcagacagagtccagggccaggaatcttccagaaggacgctggatctggcacagccaccaagggatgctctagttccacntnnnntgggtnccgccngccncgcgctgcaggcagatcaagctt

SEQ ID NO: 213362 - DNA, 387 bp, Canis familiaris; identical to SEQ ID NO: 3255
  misc_feature (6)..(6): n is a, c, g, or t
  misc_feature (209)..(209): n is a, c, g, or t
  misc_feature (279)..(279): n is a, c, g, or t
  misc_feature (341)..(341): n is a, c, g, or t
  misc_feature (355)..(355): n is a, c, g, or t
  misc_feature (359)..(359): n is a, c, g, or t
  misc_feature (365)..(366): n is a, c, g, or t
  misc_feature (368)..(368): n is a, c, g, or t
  misc_feature (379)..(379): n is a, c, g, or t
  misc_feature (382)..(382): n is a, c, g, or t
  misc_feature (386)..(386): n is a, c, g, or t

SEQ ID NO: 213363 - DNA, 332 bp, Canis familiaris; identical to SEQ ID NO: 3256
  misc_feature (11)..(11): n is a, c, g, or t
  misc_feature (34)..(34): n is a, c, g, or t
  misc_feature (45)..(45): n is a, c, g, or t
  misc_feature (47)..(47): n is a, c, g, or t
  misc_feature (49)..(49): n is a, c, g, or t
  misc_feature (51)..(51): n is a, c, g, or t
  misc_feature (53)..(53): n is a, c, g, or t
  misc_feature (57)..(57): n is a, c, g, or t
  misc_feature (59)..(59): n is a, c, g, or t
  misc_feature (61)..(61): n is a, c, g, or t
  misc_feature (63)..(63): n is a, c, g, or t
  misc_feature (96)..(96): n is a, c, g, or t
  misc_feature (143)..(143): n is a, c, g, or t
  misc_feature (188)..(188): n is a, c, g, or t
  misc_feature (197)..(197): n is a, c, g, or t
  misc_feature (264)..(264): n is a, c, g, or t
  misc_feature (321)..(321): n is a, c, g, or t
  misc_feature (329)..(329): n is a, c, g, or t

SEQ ID NO: 213364 - DNA, 400 bp, Canis familiaris; identical to SEQ ID NO: 3257
  misc_feature (2)..(2): n is a, c, g, or t
  misc_feature (19)..(19): n is a, c, g, or t
  misc_feature (30)..(30): n is a, c, g, or t
  misc_feature (42)..(42): n is a, c, g, or t
  misc_feature (50)..(50): n is a, c, g, or t
  misc_feature (52)..(52): n is a, c, g, or t
  misc_feature (56)..(57): n is a, c, g, or t
  misc_feature (72)..(72): n is a, c, g, or t
  misc_feature (230)..(230): n is a, c, g, or t
  misc_feature (397)..(397): n is a, c, g, or t

SEQ ID NO: 213365 - DNA, 357 bp, Canis familiaris; identical to SEQ ID NO: 3258
  misc_feature (238)..(238): n is a, c, g, or t
  misc_feature (249)..(249): n is a, c, g, or t

SEQ ID NO: 213366 - DNA, 362 bp, Canis familiaris; identical to SEQ ID NO: 3259
  misc_feature (9)..(9): n is a, c, g, or t
  misc_feature (274)..(274): n is a, c, g, or t
  misc_feature (284)..(284): n is a, c, g, or t
  misc_feature (316)..(316): n is a, c, g, or t

SEQ ID NO: 213367 - DNA, 330 bp, Canis familiaris; identical to SEQ ID NO: 3260
  misc_feature (320)..(320): n is a, c, g, or t
  misc_feature (325)..(326): n is a, c, g, or t

SEQ ID NO: 213368 - DNA, 600 bp, Canis familiaris
  misc_feature (4)..(4): n is a, c, g, or t
  misc_feature (52)..(52): n is a, c, g, or t
  misc_feature (147)..(147): n is a, c, g, or t
  misc_feature (149)..(149): n is a, c, g, or t
  misc_feature (151)..(151): n is a, c, g, or t
  misc_feature (175)..(175): n is a, c, g, or t
  misc_feature (177)..(177): n is a, c, g, or t
  misc_feature (538)..(538): n is a, c, g, or t
  misc_feature (580)..(580): n is a, c, g, or t
  misc_feature (584)..(584): n is a, c, g, or t
  misc_feature (588)..(588): n is a, c, g, or t
taantacacacacacacgcacaaacatgtaccgttccacaggcaggctctgnatcctggcatcactgggtgaacatctacgggggcctcggttggggtgtctcacccctcctacaactacaggtcttactgccccccagccctgggntngnggtgagtggggcaggagcaggtgntngaagcaggtgcttctaggaactctgaaacggaagagcaggatcctaggactgccttagccactcctatgccctctccccatccccctccctctgtgccaaagacgttccttgtctcctgtctcccctctctcctccttcctttactaacaggactctcgggctgaggctgggcatgtggccgaagactacctgtctcagcttcccttgcagctacctgtggccatatgactaaggctcggccagtaagatggaatcagaagtgaccatgccatttccagctcatgcccttgacaggaaagggcatgtgcttctcctgccattctctgctcttcccgggctgggatgcacatgtgatggtgngactaaagcaaccactctatccagaattggaaggtgcacatntagnagcncagatcaagctt

SEQ ID NO: 213369 - DNA, 600 bp, Canis familiaris
  misc_feature (108)..(108): n is a, c, g, or t
  misc_feature (115)..(115): n is a, c, g, or t
  misc_feature (165)..(165): n is a, c, g, or t
  misc_feature (168)..(168): n is a, c, g, or t
  misc_feature (219)..(219): n is a, c, g, or t
  misc_feature (573)..(573): n is a, c, g, or t
cagtggtatgatcaacaagaaatcttatgcagtgacctcccacctacagcattcccagtgctgacctcatctgtccctttcccccacaccactccccactgcttttgnacccctntccttcccatacacacacacacacacacacacacacatacacatttttanttntttttactttgtgcggccattactcccacacccctattgctgcccaaaatncacatgggctgagggctggggctggatgaacagacaccactctctactcatacccctcctttgtgtggttggaaaatgtattttgcattttgtgtggtttttttttctgcataaaaaatgattctactaatacatcttttgaagatcatgaacaatgtgagagtgtgaagtgggtgaggagcaatttaaaaagaatggtcaagtaccaccttgcagaggtggtaacctatgagcagagagcagatgacaagaagcaaccagggctaggggagcagaaagcagcgcccccccctccccccagcacagaaacggcccacagagcacccacagatctgcgtgttacagtaatggaangggagtcctgatggctggagagcacag

SEQ ID NO: 213370 - DNA, 600 bp, Canis familiaris
  misc_feature (28)..(28): n is a, c, g, or t
  misc_feature (242)..(242): n is a, c, g, or t
  misc_feature (251)..(251): n is a, c, g, or t
  misc_feature (256)..(256): n is a, c, g, or t
  misc_feature (273)..(273): n is a, c, g, or t
  misc_feature (275)..(275): n is a, c, g, or t
  misc_feature (283)..(283): n is a, c, g, or t
  misc_feature (286)..(286): n is a, c, g, or t
  misc_feature (291)..(291): n is a, c, g, or t
  misc_feature (293)..(293): n is a, c, g, or t
  misc_feature (398)..(398): n is a, c, g, or t
  misc_feature (409)..(409): n is a, c, g, or t
  misc_feature (432)..(432): n is a, c, g, or t
  misc_feature (437)..(437): n is a, c, g, or t
  misc_feature (457)..(457): n is a, c, g, or t
  misc_feature (496)..(496): n is a, c, g, or t
  misc_feature (504)..(504): n is a, c, g, or t
tggcatatatcaagagcatacgcatgtnaagacgaccatataagcagagaactaaagatcaataaaagctgactaagtcagagtgaggtttttattgaaatgtcagaagacctcgacttggcttagaccctatccttgaaacttgagctccacactggagttcatgcatgaaagagaaagaaggaagaagtgttctaaagccatgccaaaccctttttttttttttaagattttatttattnattcatggncacanacacacacacacacacncncacactgnggnagtgncngagttgagaataacttttaaaaatgaaaataaccaaatcttatatgtaaatcttcatatgaaaataaccaaataactattttttataggtcattctatttacacnaggtgacaganattctgaaatggagccaagatancttgnagccttcccagtatgacggnaggattcagcagaatatagttggagacagttatttgaanacaaacanacaaacaaacaaacaaacatatttagaccctcaagagttaagactcctccaaaattcaagaaaacagccagctttttccttaactcagatcgaatt

SEQ ID NO: 213371 - DNA, 600 bp, Canis familiaris
  misc_feature (165)..(165): n is a, c, g, or t
  misc_feature (177)..(177): n is a, c, g, or t
  misc_feature (552)..(552): n is a, c, g, or t
ctgtgcaaggaaccagagtacacaggtaactcggtcccagtctctgctcagagttttgagcagaaaacaagacaaagaatgcatcagtgttttctggacgagtgtcctagggatgaatgagggagatgtctgaggggacgtgtgcctgagtaaaagcgcagatgntacaaccccacnctgcacatatgcccatgcccacaaatgtacccatgcacacactgtacacacagacacacatctgcacatatgcacatattgcaaatgcatacacacatgcacgcaggctactagacattatatatggacagtatgagggagttcgtgaggccgtgattgcacagggagggctcctgaggtgttcagtccacgcgaaggaatgtggcagctttctgcttcccatccctactccagactcatccacactggctgccctgcattttccaaaacaacaggaccgtccagctctaagaccttgtctttcgttgattttcactctctcatgtcactcagctaatgctctttcaaatttgggattggacatcattcttcctnacaagcttacagcaactcctccatgtaaagtgaggggtatcagcttcc

SEQ ID NO: 213372 - DNA, 371 bp, Canis familiaris; identical to SEQ ID NO: 3265
  misc_feature (12)..(12): n is a, c, g, or t
  misc_feature (30)..(30): n is a, c, g, or t
  misc_feature (87)..(87): n is a, c, g, or t
  misc_feature (238)..(238): n is a, c, g, or t
  misc_feature (241)..(241): n is a, c, g, or t
  misc_feature (261)..(261): n is a, c, g, or t
  misc_feature (266)..(266): n is a, c, g, or t
  misc_feature (284)..(284): n is a, c, g, or t
  misc_feature (306)..(306): n is a, c, g, or t
  misc_feature (335)..(335): n is a, c, g, or t

SEQ ID NO: 213373 - DNA, 449 bp, Canis familiaris; identical to SEQ ID NO: 3266
  misc_feature (9)..(9): n is a, c, g, or t
  misc_feature (203)..(203): n is a, c, g, or t
  misc_feature (420)..(420): n is a, c, g, or t
  misc_feature (431)..(431): n is a, c, g, or t

SEQ ID NO: 213374 - DNA, 600 bp, Canis familiaris
  misc_feature (163)..(163): n is a, c, g, or t
  misc_feature (166)..(166): n is a, c, g, or t
  misc_feature (179)..(179): n is a, c, g, or t
tggatgcttttctctgtggcctgagggaacctctcctggccacccgattactattcttgttcccttatgtgtatttcctcttttagcaaattctgtcctctctgtttaaaaatgaccccactaataatgctaccttctgtatcaggatatagtttggtcaaanganagaaaccaaactnctggtgggtgacatagaacaagggaattagggttagagctggttacagttgtgggagctggtggagccagcttgcctctgtgtccggtgttcagcttggcatccctaaagatcactgagactgatgttgggaggggaggctaggcaaggatgagagccaggacactctgtctctcaccacctgtaacctcacaggtatgggtgactgggggagaagctgaccctcgccctggaaccacaccctcaggccctgggcctggagaaacggaaagaggagatgtgccaggagctgggggagccagtagtctgggtatgcccccagcaacagagggagctgatagatcagggatgacatgcagagctgaccctgtgcctggggcggtgaactgactctcagaaggcaagacacacagatcaagctt

SEQ ID NO: 213375 - DNA, 427 bp, Canis familiaris; identical to SEQ ID NO: 3268
  misc_feature (8)..(9): n is a, c, g, or t
  misc_feature (12)..(12): n is a, c, g, or t
  misc_feature (16)..(16): n is a, c, g, or t
  misc_feature (23)..(23): n is a, c, g, or t
  misc_feature (39)..(39): n is a, c, g, or t
  misc_feature (42)..(42): n is a, c, g, or t
  misc_feature (80)..(80): n is a, c, g, or t
  misc_feature (99)..(99): n is a, c, g, or t
  misc_feature (155)..(155): n is a, c, g, or t
  misc_feature (223)..(223): n is a, c, g, or t
  misc_feature (233)..(233): n is a, c, g, or t
  misc_feature (265)..(265): n is a, c, g, or t
  misc_feature (311)..(311): n is a, c, g, or t
  misc_feature (364)..(364): n is a, c, g, or t
  misc_feature (376)..(376): n is a, c, g, or t
  misc_feature (382)..(382): n is a, c, g, or t
  misc_feature (404)..(404): n is a, c, g, or t
  misc_feature (413)..(413): n is a, c, g, or t
  misc_feature (417)..(417): n is a, c, g, or t

SEQ ID NO: 213376 - DNA, 461 bp, Canis familiaris; identical to SEQ ID NO: 3269
  misc_feature (45)..(45): n is a, c, g, or t
  misc_feature (88)..(88): n is a, c, g, or t

SEQ ID NO: 213377 - DNA, 600 bp, Canis familiaris
  misc_feature (191)..(191): n is a, c, g, or t
  misc_feature (203)..(203): n is a, c, g, or t
  misc_feature (206)..(206): n is a, c, g, or t
  misc_feature (213)..(213): n is a, c, g, or t
  misc_feature (229)..(229): n is a, c, g, or t
  misc_feature (232)..(232): n is a, c, g, or t
  misc_feature (254)..(254): n is a, c, g, or t
  misc_feature (256)..(256): n is a, c, g, or t
  misc_feature (262)..(262): n is a, c, g, or t
  misc_feature (283)..(283): n is a, c, g, or t
  misc_feature (316)..(316): n is a, c, g, or t
  misc_feature (332)..(332): n is a, c, g, or t
  misc_feature (345)..(345): n is a, c, g, or t
  misc_feature (355)..(355): n is a, c, g, or t
  misc_feature (366)..(366): n is a, c, g, or t
  misc_feature (370)..(370): n is a, c, g, or t
  misc_feature (384)..(384): n is a, c, g, or t
  misc_feature (410)..(410): n is a, c, g, or t
  misc_feature (429)..(429): n is a, c, g, or t
  misc_feature (442)..(442): n is a, c, g, or t
  misc_feature (449)..(449): n is a, c, g, or t
  misc_feature (458)..(458): n is a, c, g, or t
  misc_feature (510)..(510): n is a, c, g, or t
  misc_feature (524)..(524): n is a, c, g, or t
  misc_feature (541)..(541): n is a, c, g, or t
  misc_feature (559)..(559): n is a, c, g, or t
  misc_feature (572)..(572): n is a, c, g, or t
  misc_feature (577)..(577): n is a, c, g, or t
  misc_feature (594)..(594): n is a, c, g, or t
atacacactctttcctccagccactgagctgcagacgtatccttccttctagggctggaatcttatttggagctccctaaaggccaccttaaaaatgagaaaaggcaggtgcttgaaaactctcttgagaaatctgccaataccactactaaacgggcctctatagtgtgccaggtatcatcctcaccccngtgaggtgacanctncctgggnggtctctgtccagggnggngaggaggccccacacaggaagngncacatntcagagaggcaagtcaatgancaggtcaagggtggcagtgtctttttcacagcntctgttcacagcgatnctcatgagccttnagagtggctncagcaaggctnccanacttcgctgggtangcaggtgggaaaacagtgggcttacnagaatcatccactgtcttnaaggcactgtgtntccacanacagaaaanaatgggacaaggcacggacattaggaaccagcccagaaccatggtgtaccangcaggctgaaatanaaatgatgaaaatgagnacagtagctgagcagaangaaatcctgcagnccggnggaaccactagttctanacggcg

SEQ ID NO: 213378 - DNA, 328 bp, Canis familiaris; identical to SEQ ID NO: 3271
  misc_feature (90)..(90): n is a, c, g, or t
  misc_feature (101)..(101): n is a, c, g, or t
  misc_feature (103)..(103): n is a, c, g, or t
  misc_feature (150)..(150): n is a, c, g, or t
  misc_feature (178)..(178): n is a, c, g, or t
  misc_feature (182)..(182): n is a, c, g, or t
  misc_feature (201)..(201): n is a, c, g, or t
  misc_feature (261)..(261): n is a, c, g, or t
  misc_feature (279)..(279): n is a, c, g, or t
  misc_feature (298)..(298): n is a, c, g, or t
  misc_feature (326)..(326): n is a, c, g, or t

SEQ ID NO: 213379 - DNA, 350 bp, Canis familiaris; identical to SEQ ID NO: 3272
  misc_feature (7)..(7): n is a, c, g, or t
  misc_feature (107)..(107): n is a, c, g, or t
  misc_feature (231)..(231): n is a, c, g, or t
  misc_feature (289)..(289): n is a, c, g, or t
  misc_feature (330)..(330): n is a, c, g, or t
  misc_feature (333)..(333): n is a, c, g, or t
  misc_feature (337)..(337): n is a, c, g, or t
  misc_feature (339)..(339): n is a, c, g, or t
  misc_feature (343)..(343): n is a, c, g, or t

SEQ ID NO: 213380 - DNA, 401 bp, Canis familiaris; identical to SEQ ID NO: 3273
  misc_feature (80)..(80): n is a, c, g, or t
  misc_feature (198)..(198): n is a, c, g, or t
  misc_feature (369)..(369): n is a, c, g, or t

SEQ ID NO: 213381 - DNA, 480 bp, Canis familiaris; identical to SEQ ID NO: 3274
  misc_feature (28)..(28): n is a, c, g, or t
  misc_feature (32)..(32): n is a, c, g, or t
  misc_feature (142)..(142): n is a, c, g, or t
  misc_feature (272)..(272): n is a, c, g, or t
  misc_feature (454)..(454): n is a, c, g, or t
  misc_feature (466)..(466): n is a, c, g, or t
  misc_feature (468)..(468): n is a, c, g, or t
  misc_feature (470)..(470): n is a, c, g, or t
  misc_feature (473)..(473): n is a, c, g, or t
  misc_feature (476)..(476): n is a, c, g, or t

SEQ ID NO: 213382 - DNA, 600 bp, Canis familiaris
  misc_feature (156)..(156): n is a, c, g, or t
  misc_feature (197)..(197): n is a, c, g, or t
  misc_feature (226)..(226): n is a, c, g, or t
  misc_feature (246)..(246): n is a, c, g, or t
  misc_feature (298)..(298): n is a, c, g, or t
aacaaaggagaagcagaaattactgtggaggttgaagaaggttcagttcaaggtttcaaagggacagagggctggtgaccacatccaacaagcagttagagattgagaattggggccattttactctgtcctcccagccttggagagggttctggncaaaatgcttctataactccagcattgcaatcaaggcaaanaaatggcttcctctacgccttcccaaganacacgcacacacccatgcanacacgcatgcgtgcatgttcacacacacacaagacacattgccagtgcacanacatgcatgcatgctggcatcggcatgcacgctgacacatagacacacactgtgacacacacaacacatggcaggtaacatggactgcctctggctgtagaagtgctttcaagcgcctttctttcttgtccttgcctggagtttacagcacttggaaaatgtcaggcgtgggaggccttctagtcttgggttaggttaaaactccctctacatatttggagggcgtccaggccctgcgagctcattcacagagcagataacagtgaccttgctggtgagggaggacagcccagatcaagctt

SEQ ID NO: 213383 - DNA, 320 bp, Canis familiaris; identical to SEQ ID NO: 3276
  misc_feature (5)..(5): n is a, c, g, or t
  misc_feature (48)..(48): n is a, c, g, or t
  misc_feature (53)..(53): n is a, c, g, or t
  misc_feature (60)..(60): n is a, c, g, or t
  misc_feature (247)..(247): n is a, c, g, or t
  misc_feature (264)..(264): n is a, c, g, or t

SEQ ID NO: 213384 - DNA, 397 bp, Canis familiaris; identical to SEQ ID NO: 3277
  misc_feature (4)..(4): n is a, c, g, or t
  misc_feature (8)..(8): n is a, c, g, or t
  misc_feature (32)..(32): n is a, c, g, or t
  misc_feature (38)..(38): n is a, c, g, or t
  misc_feature (63)..(63): n is a, c, g, or t
  misc_feature (134)..(134): n is a, c, g, or t
  misc_feature (189)..(189): n is a, c, g, or t
  misc_feature (215)..(215): n is a, c, g, or t
  misc_feature (251)..(251): n is a, c, g, or t
  misc_feature (291)..(291): n is a, c, g, or t
  misc_feature (295)..(295): n is a, c, g, or t
  misc_feature (298)..(298): n is a, c, g, or t
  misc_feature (324)..(324): n is a, c, g, or t
  misc_feature (345)..(345): n is a, c, g, or t
  misc_feature (393)..(393): n is a, c, g, or t

SEQ ID NO: 213385 - DNA, 423 bp, Canis familiaris; identical to SEQ ID NO: 3278
  misc_feature (16)..(16): n is a, c, g, or t
  misc_feature (23)..(23): n is a, c, g, or t
  misc_feature (51)..(51): n is a, c, g, or t
  misc_feature (53)..(53): n is a, c, g, or t
  misc_feature (176)..(176): n is a, c, g, or t
  misc_feature (208)..(208): n is a, c, g, or t
  misc_feature (257)..(258): n is a, c, g, or t
  misc_feature (264)..(264): n is a, c, g, or t
  misc_feature (271)..(271): n is a, c, g, or t
  misc_feature (274)..(274): n is a, c, g, or t
  misc_feature (281)..(281): n is a, c, g, or t
  misc_feature (293)..(293): n is a, c, g, or t
  misc_feature (298)..(298): n is a, c, g, or t
  misc_feature (301)..(301): n is a, c, g, or t
  misc_feature (315)..(315): n is a, c, g, or t
  misc_feature (318)..(318): n is a, c, g, or t
  misc_feature (328)..(328): n is a, c, g, or t
  misc_feature (330)..(330): n is a, c, g, or t
  misc_feature (337)..(338): n is a, c, g, or t
  misc_feature (345)..(345): n is a, c, g, or t
  misc_feature (351)..(351): n is a, c, g, or t
  misc_feature (380)..(380): n is a, c, g, or t
  misc_feature (385)..(386): n is a, c, g, or t
  misc_feature (396)..(396): n is a, c, g, or t
  misc_feature (401)..(401): n is a, c, g, or t
  misc_feature (412)..(412): n is a, c, g, or t
  misc_feature (419)..(419): n is a, c, g, or t

SEQ ID NO: 213386 - DNA, 408 bp, Canis familiaris; identical to SEQ ID NO: 3279
  misc_feature (33)..(33): n is a, c, g, or t
  misc_feature (35)..(35): n is a, c, g, or t
  misc_feature (47)..(47): n is a, c, g, or t
  misc_feature (51)..(51): n is a, c, g, or t
  misc_feature (53)..(53): n is a, c, g, or t
  misc_feature (236)..(236): n is a, c, g, or t
  misc_feature (282)..(283): n is a, c, g, or t
  misc_feature (285)..(285): n is a, c, g, or t
  misc_feature (292)..(292): n is a, c, g, or t
  misc_feature (319)..(319): n is a, c, g, or t
  misc_feature (349)..(349): n is a, c, g, or t
  misc_feature (352)..(352): n is a, c, g, or t
  misc_feature (374)..(374): n is a, c, g, or t
  misc_feature (377)..(377): n is a, c, g, or t
  misc_feature (391)..(391): n is a, c, g, or t
  misc_feature (398)..(399): n is a, c, g, or t

SEQ ID NO: 213387 - DNA, 416 bp, Canis familiaris; identical to SEQ ID NO: 3280
  misc_feature (72)..(72): n is a, c, g, or t
  misc_feature (215)..(215): n is a, c, g, or t
  misc_feature (226)..(226): n is a, c, g, or t
  misc_feature (234)..(234): n is a, c, g, or t
  misc_feature (247)..(247): n is a, c, g, or t
  misc_feature (270)..(270): n is a, c, g, or t
  misc_feature (294)..(294): n is a, c, g, or t
  misc_feature (299)..(299): n is a, c, g, or t
  misc_feature (319)..(319): n is a, c, g, or t
  misc_feature (338)..(338): n is a, c, g, or t
  misc_feature (353)..(353): n is a, c, g, or t
  misc_feature (368)..(368): n is a, c, g, or t
  misc_feature (370)..(370): n is a, c, g, or t
  misc_feature (410)..(410): n is a, c, g, or t
  misc_feature (414)..(414): n is a, c, g, or t

SEQ ID NO: 213388 - DNA, 600 bp, Canis familiaris
  misc_feature (17)..(17): n is a, c, g, or t
  misc_feature (104)..(104): n is a, c, g, or t
  misc_feature (114)..(114): n is a, c, g, or t
  misc_feature (128)..(128): n is a, c, g, or t
  misc_feature (133)..(133): n is a, c, g, or t
  misc_feature (156)..(156): n is a, c, g, or t
  misc_feature (183)..(183): n is a, c, g, or t
  misc_feature (198)..(198): n is a, c, g, or t
  misc_feature (201)..(201): n is a, c, g, or t
  misc_feature (229)..(230): n is a, c, g, or t
  misc_feature (250)..(250): n is a, c, g, or t
  misc_feature (257)..(257): n is a, c, g, or t
  misc_feature (265)..(265): n is a, c, g, or t
  misc_feature (272)..(272): n is a, c, g, or t
  misc_feature (279)..(279): n is a, c, g, or t
  misc_feature (337)..(337): n is a, c, g, or t
  misc_feature (347)..(347): n is a, c, g, or t
  misc_feature (352)..(352): n is a, c, g, or t
  misc_feature (366)..(366): n is a, c, g, or t
  misc_feature (572)..(572): n is a, c, g, or t
cgtctggggtgggaagnagctggtggtggctggccaccacggagagtacctggactccggatccagacttgtagctcaaatccccgctctgccacckaaccygnagtaaagtantgtgagtctgaggncacynctktggtcttcattttccccccnatctgkgcaaaagtgagataawgagcnttctatccaatatgnaantagatgaattttcacgrkaggcaagaannaagtgaattttaatgyactnttttttnaaatatgngggtganactgcanaattgcaatataatacaatagaggaaaaaaggaaaaaagagactggtggggagccccnaggcctggcntcttntttttttttttttncctaggcctggcttctaatgaagactgtggatcttaagccattcacctcttggccatcagtctcccttttgttttccaagagggatggggagatggtgactgggattccttccagccctggcctctgggagagcctctgaatatagagggggagcttgtgggacagtgggagatgcagtgtgtggtgtgtgtgtgtgtgtgtgatntctctttccttccaggggcaccagatca

SEQ ID NO: 213389 - DNA, 399 bp, Canis familiaris; identical to SEQ ID NO: 3282
  misc_feature (358)..(358): n is a, c, g, or t
  misc_feature (370)..(370): n is a, c, g, or t
  misc_feature (379)..(379): n is a, c, g, or t
  misc_feature (387)..(390): n is a, c, g, or t

SEQ ID NO: 213390 - DNA, 400 bp, Canis familiaris; identical to SEQ ID NO: 3283
  misc_feature (160)..(161): n is a, c, g, or t
  misc_feature (354)..(355): n is a, c, g, or t
  misc_feature (369)..(369): n is a, c, g, or t
  misc_feature (376)..(376): n is a, c, g, or t
  misc_feature (380)..(380): n is a, c, g, or t
  misc_feature (394)..(394): n is a, c, g, or t

SEQ ID NO: 213391 - DNA, 310 bp, Canis familiaris; identical to SEQ ID NO: 3284
  misc_feature (6)..(6): n is a, c, g, or t
  misc_feature (26)..(26): n is a, c, g, or t
  misc_feature (76)..(76): n is a, c, g, or t
  misc_feature (148)..(148): n is a, c, g, or t
  misc_feature (174)..(174): n is a, c, g, or t
  misc_feature (184)..(184): n is a, c, g, or t
  misc_feature (216)..(216): n is a, c, g, or t
  misc_feature (240)..(240): n is a, c, g, or t
  misc_feature (272)..(272): n is a, c, g, or t
  misc_feature (280)..(280): n is a, c, g, or t
  misc_feature (303)..(303): n is a, c, g, or t
  misc_feature (308)..(308): n is a, c, g, or t

SEQ ID NO: 213392 - DNA, 600 bp, Canis familiaris
  misc_feature (60)..(60): n is a, c, g, or t
  misc_feature (164)..(164): n is a, c, g, or t
  misc_feature (167)..(167): n is a, c, g, or t
  misc_feature (274)..(274): n is a, c, g, or t
  misc_feature (284)..(284): n is a, c, g, or t
  misc_feature (370)..(370): n is a, c, g, or t
  misc_feature (388)..(388): n is a, c, g, or t
  misc_feature (585)..(585): n is a, c, g, or t
  misc_feature (597)..(597): n is a, c, g, or t
ggcagagactgtgtcccttctcttaaaaaaaattaaaatatattcatatatatatatgtntgtgtgtgtgtgtgtgtgtgtgcgtatttattatatatatatttccttttctgtcttttgttctttccagcctgtagttagttactggtggcacctgtaccagnatnacccagaaggctggttcaaatgtaggtttctgggctcctgcttgcttcctgactcagtaggtttggggcccggggcatctttggcatgctcttggatgatggggagnccattgtctnaaagggccagactcccagggccccagcttccagggtcatggctacagttgatacccacagcttccatcccaaatctggggttcttncctgcccacctcagtggncttccctgtgcagcacacctgagtaggacctctatcaatgccttgaaatcgctccacctggaagtcgtgaagatgagctggggtcacctgtaaatatacaaggcctctggggaaggggataaagtgcaagcaagcatcgtatactctgggctcagtgcaaggacagaaggtctgaggatggaggccccggcacaaanctctctcatggnccc

SEQ ID NO: 213393 - DNA, 433 bp, Canis familiaris; identical to SEQ ID NO: 3286
  misc_feature (11)..(12): n is a, c, g, or t
  misc_feature (329)..(329): n is a, c, g, or t
  misc_feature (393)..(393): n is a, c, g, or t
  misc_feature (408)..(408): n is a, c, g, or t
  misc_feature (416)..(416): n is a, c, g, or t
  misc_feature (420)..(420): n is a, c, g, or t
  misc_feature (422)..(422): n is a, c, g, or t
  misc_feature (424)..(424): n is a, c, g, or t
  misc_feature (428)..(428): n is a, c, g, or t

SEQ ID NO: 213394 - DNA, 427 bp, Canis familiaris; identical to SEQ ID NO: 3287
  misc_feature (7)..(7): n is a, c, g, or t
  misc_feature (323)..(323): n is a, c, g, or t
  misc_feature (376)..(376): n is a, c, g, or t
  misc_feature (390)..(390): n is a, c, g, or t
  misc_feature (401)..(401): n is a, c, g, or t
  misc_feature (404)..(404): n is a, c, g, or t
  misc_feature (407)..(407): n is a, c, g, or t

SEQ ID NO: 213395 - DNA, 398 bp, Canis familiaris; identical to SEQ ID NO: 3288
  misc_feature (38)..(38): n is a, c, g, or t
  misc_feature (63)..(63): n is a, c, g, or t
  misc_feature (176)..(176): n is a, c, g, or t
  misc_feature (197)..(197): n is a, c, g, or t
  misc_feature (240)..(240): n is a, c, g, or t
  misc_feature (283)..(283): n is a, c, g, or t
  misc_feature (317)..(317): n is a, c, g, or t
  misc_feature (334)..(334): n is a, c, g, or t
  misc_feature (353)..(353): n is a, c, g, or t
  misc_feature (361)..(361): n is a, c, g, or t
  misc_feature (363)..(363): n is a, c, g, or t
  misc_feature (372)..(372): n is a, c, g, or t
  misc_feature (392)..(392): n is a, c, g, or t

SEQ ID NO: 213396 - DNA, 401 bp, Canis familiaris; identical to SEQ ID NO: 3289
  misc_feature (70)..(70): n is a, c, g, or t
  misc_feature (358)..(358): n is a, c, g, or t
  misc_feature (375)..(376): n is a, c, g, or t
  misc_feature (378)..(378): n is a, c, g, or t
  misc_feature (382)..(383): n is a, c, g, or t
  misc_feature (385)..(386): n is a, c, g, or t
  misc_feature (391)..(391): n is a, c, g, or t
  misc_feature (398)..(399): n is a, c, g, or t

SEQ ID NO: 213397 - DNA, 393 bp, Canis familiaris; identical to SEQ ID NO: 3290
  misc_feature (14)..(14): n is a, c, g, or t
  misc_feature (17)..(17): n is a, c, g, or t
  misc_feature (60)..(60): n is a, c, g, or t
  misc_feature (65)..(65): n is a, c, g, or t
  misc_feature (79)..(79): n is a, c, g, or t
  misc_feature (88)..(88): n is a, c, g, or t
  misc_feature (355)..(355): n is a, c, g, or t

SEQ ID NO: 213398 - DNA, 600 bp, Canis familiaris
  misc_feature (25)..(25): n is a, c, g, or t
  misc_feature (36)..(36): n is a, c, g, or t
  misc_feature (45)..(45): n is a, c, g, or t
  misc_feature (80)..(81): n is a, c, g, or t
  misc_feature (349)..(349): n is a, c, g, or t
  misc_feature (377)..(377): n is a, c, g, or t
  misc_feature (379)..(379): n is a, c, g, or t
  misc_feature (390)..(390): n is a, c, g, or t
  misc_feature (447)..(447): n is a, c, g, or t
  misc_feature (523)..(525): n is a, c, g, or t
  misc_feature (533)..(533): n is a, c, g, or t
  misc_feature (538)..(539): n is a, c, g, or t
  misc_feature (545)..(545): n is a, c, g, or t
  misc_feature (597)..(598): n is a, c, g, or t
agtggccaaataatacaggattgtncaacaaaaganttccctttnattaaaaaatttcattatcacgaataggatatttnncctctttcacacacacacacacacacacacacacacacacacggcattgcaaaaccattgggaaaaagaactccaggcatttatttggctgccaacagagggaagaatgaatgtgaacattggctggtctactgactcctctataagccaatggtgttttggttaataccacaaaaagaatacataggtgattaaacactgggctttacccacatatgctcctgagcttattctagtgtggttattttcccaggaggccttataaaanctgtttttgaatcacctctttcattttncnggtggtatttncggcagttgggtataacaacttctctccccttcaggccaaagggttgggttccagangatgattctaggtagagaagaaagccaagatgttattgaacataccacttttaatggggacacatcttggaaggtnnncctggagngcacnnaatctnagcataatataatcccaatgcacactgacagtaatgcatgaacgagtcatcnnct

SEQ ID NO: 213399 - DNA, 588 bp, Canis familiaris; identical to SEQ ID NO: 3292
  misc_feature (10)..(10): n is a, c, g, or t
  misc_feature (15)..(16): n is a, c, g, or t
  misc_feature (37)..(37): n is a, c, g, or t
  misc_feature (300)..(300): n is a, c, g, or t
  misc_feature (320)..(320): n is a, c, g, or t
  misc_feature (322)..(322): n is a, c, g, or t
  misc_feature (326)..(326): n is a, c, g, or t
  misc_feature (328)..(329): n is a, c, g, or t
  misc_feature (459)..(459): n is a, c, g, or t
  misc_feature (492)..(492): n is a, c, g, or t

SEQ ID NO: 213400 - DNA, 600 bp, Canis familiaris
  misc_feature (89)..(89): n is a, c, g, or t
  misc_feature (135)..(135): n is a, c, g, or t
  misc_feature (141)..(141): n is a, c, g, or t
  misc_feature (149)..(149): n is a, c, g, or t
  misc_feature (157)..(157): n is a, c, g, or t
  misc_feature (161)..(161): n is a, c, g, or t
  misc_feature (179)..(179): n is a, c, g, or t
  misc_feature (244)..(244): n is a, c, g, or t
  misc_feature (487)..(487): n is a, c, g, or t
  misc_feature (596)..(596): n is a, c, g, or t
tacaaagagggccaaatgccaaacagctccaaatttcaaattcccctgggcagccaaaccagaggttgcctgggcccagaattaccagntcactcagggctgggaaacaatctcatcttgttttaatggttccanccacanaaatttanctcttggntggnagggtgtggtggcaaaanaaaaagagctagtgtttcagcaggggaaagactgaaagagagggagaatgacagagagtagagtncggctctgcacttcaaaaagaagcaaggcaggaataaagaaaaaaaaccttgaagagtgacaggggaaacattttttttaacagtacacatatgcctgcctgactgcacatgctctcacatggaccacacacaagtacacacacagacacacacacacacactccaccataaacctcagactgggaagcaactaagaagccatcaccaacctgactttgccaaatacttcacaaagtcggcancaacagcagcagcaaaagtgcctttgacaaagatcctctctgaccttcctttcctagccctgttataaactgcccccctccccctgctgttatcccaagccagatcaancctt

SEQ ID NO: 213401 - DNA, 600 bp, Canis familiaris
  misc_feature (69)..(69): n is a, c, g, or t
  misc_feature (90)..(90): n is a, c, g, or t
  misc_feature (97)..(98): n is a, c, g, or t
  misc_feature (118)..(119): n is a, c, g, or t
  misc_feature (185)..(185): n is a, c, g, or t
  misc_feature (575)..(575): n is a, c, g, or t
  misc_feature (577)..(577): n is a, c, g, or t
  misc_feature (586)..(586): n is a, c, g, or t
  misc_feature (591)..(591): n is a, c, g, or t
attcttccaggatggaaagtttggccaacaacagttagttcactagcctatggctgggtcaaaaggcancaacttggcaccagggggcancacatgnnatattattttaggaggaggnnacatccatggagcattgaacacatatttccagggacaacaacaacacacaaccattccagaggganacaacaccacaacacaacaacacacatgcttccttgatgaaggagcgaacaacagaagaaagcatttcactctcaagtttggagactaaaagacactatggaggaaaggccttttaatcaaagccatcaagaagccacattagaagaatctaggttaacccaagccttaaatcgatgtgtaagacccagtcgaggaaggctccagcaccagataagcacagcatgggattgcagattgttcttctgataaagaccgagtagtggaaaacaaattgggcctggcacacagggccaggctgcagaaaaaggcgccactttcaggcctcaccattgttgctcccagtggaaaccattatctagggcacctgggtggctcagcagttgagcagntncggtcgggnccagnccgttctat

SEQ ID NO: 213402 - DNA, 600 bp, Canis familiaris
  misc_feature (117)..(117): n is a, c, g, or t
  misc_feature (133)..(133): n is a, c, g, or t
  misc_feature (147)..(147): n is a, c, g, or t
  misc_feature (203)..(203): n is a, c, g, or t
  misc_feature (236)..(236): n is a, c, g, or t
  misc_feature (457)..(459): n is a, c, g, or t
  misc_feature (495)..(495): n is a, c, g, or t
  misc_feature (565)..(565): n is a, c, g, or t
  misc_feature (579)..(579): n is a, c, g, or t
  misc_feature (591)..(592): n is a, c, g, or t
  misc_feature (595)..(596): n is a, c, g, or t
agggtcatgcttataattgtatcttttaaaaagtttattttacttaaattcaattaattaacatatggctggtattattggttttcagagacagaagtcamgtggattatycaktcnttatataattacccantgstccattatatncakgtgccctccctaatggtccatcaacccaacttaccctatccaytacccccaancaaccttcagtttgttttatatgattaaagagntctcttacggtttgtctccctctctgatttcgatttgttttatttttccccctcttctcctatgatcctctgtttcgtattcttaaataccacatatgagtaagatcatatgataattgtctttctctgacttatttcacttaacataataccctgtagttccagtcacatcctttcaaatggcaagtttcattttttgatgactgagtagtattccactnnncgcgcgtgcgtgtgtaccactttttctttatccttncatctgtcagtggacatctgggctttttccatagtttggctcttgtggaccttgctgctataaacattgnggtctaggcccccnttggtcctccannagnncggc

SEQ ID NO: 213403 - DNA, 600 bp, Canis familiaris
  misc_feature (50)..(50): n is a, c, g, or t
  misc_feature (100)..(100): n is a, c, g, or t
  misc_feature (153)..(153): n is a, c, g, or t
  misc_feature (171)..(171): n is a, c, g, or t
  misc_feature (182)..(187): n is a, c, g, or t
  misc_feature (198)..(198): n is a, c, g, or t
  misc_feature (252)..(252): n is a, c, g, or t
  misc_feature (271)..(271): n is a, c, g, or t
  misc_feature (362)..(362): n is a, c, g, or t
  misc_feature (364)..(364): n is a, c, g, or t
  misc_feature (366)..(366): n is a, c, g, or t
  misc_feature (380)..(380): n is a, c, g, or t
  misc_feature (390)..(390): n is a, c, g, or t
  misc_feature (395)..(395): n is a, c, g, or t
  misc_feature (399)..(399): n is a, c, g, or t
  misc_feature (408)..(409): n is a, c, g, or t
  misc_feature (421)..(421): n is a, c, g, or t
  misc_feature (428)..(428): n is a, c, g, or t
  misc_feature (430)..(430): n is a, c, g, or t
  misc_feature (476)..(476): n is a, c, g, or t
  misc_feature (479)..(479): n is a, c, g, or t
  misc_feature (484)..(484): n is a, c, g, or t
  misc_feature (487)..(487): n is a, c, g, or t
  misc_feature (490)..(490): n is a, c, g, or t
  misc_feature (492)..(492): n is a, c, g, or t
  misc_feature (494)..(494): n is a, c, g, or t
  misc_feature (502)..(502): n is a, c, g, or t
  misc_feature (505)..(505): n is a, c, g, or t
  misc_feature (517)..(517): n is a, c, g, or t
  misc_feature (522)..(522): n is a, c, g, or t
  misc_feature (526)..(526): n is a, c, g, or t
  misc_feature (528)..(528): n is a, c, g, or t
  misc_feature (530)..(530): n is a, c, g, or t
  misc_feature (533)..(533): n is a, c, g, or t
  misc_feature (539)..(540): n is a, c, g, or t
  misc_feature (548)..(549): n is a, c, g, or t
  misc_feature (552)..(552): n is a, c, g, or t
  misc_feature (563)..(564): n is a, c, g, or t
  misc_feature (567)..(567): n is a, c, g, or t
  misc_feature (573)..(573): n is a, c, g, or t
  misc_feature (582)..(582): n is a, c, g, or t
  misc_feature (585)..(585): n is a, c, g, or t
  misc_feature (588)..(588): n is a, c, g, or t
  misc_feature (595)..(595): n is a, c, g, or t
  misc_feature (597)..(598): n is a, c, g, or t
cagtaactacaatctgaaacaagatagaaaatatttcctttataccaganaattcccttgtattgctcagtattcaattcttccattcccagctgagacntacatcaccatactttctttttgactgttcttcaactttatataaatgaagtnttattcattctatctctntcttatacccnnnnnnttggcttcacntgttcaacatggttggattttttggggggagttaattatatttatttatttttnagagagagtgctatgagcntgtgcatggaatggaggggcagagggagagagggaaagattttggagcaaacttccacactgtgtgtgggagccccatgtggagctggatncncntggaccctggaccnggcgattcangactngagntggaaaccnnagagtgggtcanttaaccntnttgagccaccccggtggccccaaaatgtttttttttaaaatccctntgngttgntgnagnancngttggggngtntttttttatggnggggngttncncnaantttggnnggcccaanngtnggttttccctnncgnttgttngtggggccnttnggntgttttncnntt

SEQ ID NO: 213404 - DNA, 600 bp, Canis familiaris
  misc_feature (53)..(60): n is a, c, g, or t
  misc_feature (121)..(121): n is a, c, g, or t
  misc_feature (129)..(130): n is a, c, g, or t
  misc_feature (138)..(139): n is a, c, g, or t
  misc_feature (141)..(141): n is a, c, g, or t
  misc_feature (171)..(171): n is a, c, g, or t
  misc_feature (177)..(177): n is a, c, g, or t
  misc_feature (204)..(204): n is a, c, g, or t
  misc_feature (211)..(211): n is a, c, g, or t
  misc_feature (213)..(213): n is a, c, g, or t
  misc_feature (221)..(221): n is a, c, g, or t
  misc_feature (234)..(235): n is a, c, g, or t
  misc_feature (240)..(240): n is a, c, g, or t
  misc_feature (245)..(245): n is a, c, g, or t
  misc_feature (249)..(249): n is a, c, g, or t
  misc_feature (252)..(252): n is a, c, g, or t
  misc_feature (255)..(255): n is a, c, g, or t
  misc_feature (273)..(273): n is a, c, g, or t
  misc_feature (275)..(275): n is a, c, g, or t
  misc_feature (284)..(284): n is a, c, g, or t
  misc_feature (288)..(288): n is a, c, g, or t
  misc_feature (295)..(295): n is a, c, g, or t
  misc_feature (299)..(299): n is a, c, g, or t
  misc_feature (303)..(303): n is a, c, g, or t
  misc_feature (307)..(308): n is a, c, g, or t
  misc_feature (313)..(313): n is a, c, g, or t
  misc_feature (323)..(323): n is a, c, g, or t
  misc_feature (328)..(328): n is a, c, g, or t
  misc_feature (334)..(334): n is a, c, g, or t
  misc_feature (336)..(336): n is a, c, g, or t
  misc_feature (354)..(354): n is a, c, g, or t
  misc_feature (381)..(381): n is a, c, g, or t
  misc_feature (422)..(422): n is a, c, g, or t
  misc_feature (424)..(424): n is a, c, g, or t
  misc_feature (495)..(495): n is a, c, g, or t
  misc_feature (552)..(552): n is a, c, g, or t
  misc_feature (567)..(567): n is a, c, g, or t
  misc_feature (577)..(577): n is a, c, g, or t
  misc_feature (579)..(579): n is a, c, g, or t
  misc_feature (592)..(592): n is a, c, g, or t
tccttggggccagcctcatatttaattgccaggtcccacacttcattacccannnnnnnncttagagagtttgacaatcaaggaaaaccctgtgggggccaatataagggatttttaacgngctccccnnttgatgannanacagacctgtccttgggccaccctcatatntatttncagggccacactcatacacacaacacngaggggntntctgggtntcatatctgcatnntcccnccatntctnttncancagagagggagacaaacncncctctttgngctngcaaacncagntgtnatcnntcctngttttctacngaaancaacangntaaaatcacgcatagccngtatgtgtgtgtgtgtgtgtgtgtgtnttgtgtgtggtgggggtagggaggctgaggtgaatcagaangnattgcttcgcgttccaatttgctgctccaagtaaacctccaatcttacccattcccttacagaacacaaancagggcagctaagaagagctagggcacctttgggacctgcagccctgttcccctgcntgcccactgggtgtnagctactctntntactaaggcccancgtggatc

SEQ ID NO: 213405 - DNA, 600 bp, Canis familiaris
  misc_feature (159)..(159): n is a, c, g, or t
  misc_feature (161)..(161): n is a, c, g, or t
  misc_feature (272)..(275): n is a, c, g, or t
  misc_feature (279)..(279): n is a, c, g, or t
  misc_feature (311)..(311): n is a, c, g, or t
  misc_feature (323)..(323): n is a, c, g, or t
  misc_feature (334)..(334): n is a, c, g, or t
  misc_feature (429)..(429): n is a, c, g, or t
  misc_feature (440)..(440): n is a, c, g, or t
  misc_feature (593)..(593): n is a, c, g, or t
attagccacagcactattctccctcccaaggaaggtgtgaactaaacactctgaactgggcagggaggagcattgcacactcaggcgtcttcagtgtggccactgaaccaacagcagagactccatgtatgcagataaccagacactgcactcattttntnagagtcacactggttgagttgctgctggatgttttaatatacacacatccatgtagatgagtccactcccaatttaggaaacccaatacacagcaagacagacagacagannnncttnacttctccactttagaaaagttcatgcccatnaaaaagcatttnaaaatagggtncagttttgtggactgtttggcccagtggcagttcacacagggcccagcccttcaaggggttcacccatggcctgggttttggacgcttctgtaantcaccatcttnaatttctccattttaccttgagtgtggtatttggccatggaagttcggatggaacatgcagatgcttccgaggtccagagcctttagtcacggcacagttcccagccctggcaacttccgggtttcccggggggggatctcaggtgtccaganccccccc

SEQ ID NO: 213406 - DNA, 494 bp, Canis familiaris; identical to SEQ ID NO: 3299
  misc_feature (3)..(3): n is a, c, g, or t
  misc_feature (7)..(7): n is a, c, g, or t
  misc_feature (10)..(13): n is a, c, g, or t
  misc_feature (35)..(35): n is a, c, g, or t
  misc_feature (195)..(195): n is a, c, g, or t
  misc_feature (224)..(224): n is a, c, g, or t
  misc_feature (226)..(226): n is a, c, g, or t
  misc_feature (229)..(232): n is a, c, g, or t
  misc_feature (257)..(257): n is a, c, g, or t
  misc_feature (423)..(423): n is a, c, g, or t
  misc_feature (449)..(449): n is a, c, g, or t
  misc_feature (490)..(490): n is a, c, g, or t

SEQ ID NO: 213407 - DNA, 422 bp, Canis familiaris; identical to SEQ ID NO: 3300
  misc_feature (12)..(12): n is a, c, g, or t
  misc_feature (25)..(25): n is a, c, g, or t
  misc_feature (129)..(129): n is a, c, g, or t
  misc_feature (186)..(186): n is a, c, g, or t
  misc_feature (398)..(398): n is a, c, g, or t
  misc_feature (400)..(400): n is a, c, g, or t
  misc_feature (403)..(404): n is a, c, g, or t
  misc_feature (406)..(406): n is a, c, g, or t
  misc_feature (413)..(414): n is a, c, g, or t
  misc_feature (418)..(418): n is a, c, g, or t
  misc_feature (421)..(421): n is a, c, g, or t

SEQ ID NO: 213408 - DNA, 550 bp, Canis familiaris; identical to SEQ ID NO: 3301
  misc_feature (9)..(9): n is a, c, g, or t
  misc_feature (11)..(12): n is a, c, g, or t
  misc_feature (407)..(407): n is a, c, g, or t
  misc_feature (435)..(435): n is a, c, g, or t
  misc_feature (443)..(443): n is a, c, g, or t
  misc_feature (485)..(485): n is a, c, g, or t
  misc_feature (488)..(489): n is a, c, g, or t
  misc_feature (527)..(527): n is a, c, g, or t
  misc_feature (534)..(535): n is a, c, g, or t
  misc_feature (538)..(538): n is a, c, g, or t
  misc_feature (549)..(549): n is a, c, g, or t

SEQ ID NO: 213409 - DNA, 600 bp, Canis familiaris
  misc_feature (5)..(5): n is a, c, g, or t
  misc_feature (21)..(21): n is a, c, g, or t
  misc_feature (64)..(64): n is a, c, g, or t
  misc_feature (83)..(83): n is a, c, g, or t
  misc_feature (104)..(104): n is a, c, g, or t
  misc_feature (133)..(133): n is a, c, g, or t
  misc_feature (139)..(139): n is a, c, g, or t
  misc_feature (153)..(153): n is a, c, g, or t
  misc_feature (225)..(226): n is a, c, g, or t
  misc_feature (234)..(234): n is a, c, g, or t
  misc_feature (289)..(289): n is a, c, g, or t
  misc_feature (343)..(343): n is a, c, g, or t
  misc_feature (383)..(383): n is a, c, g, or t
  misc_feature (389)..(390): n is a, c, g, or t
  misc_feature (433)..(433): n is a, c, g, or t
  misc_feature (498)..(498): n is a, c, g, or t
  misc_feature (555)..(555): n is a, c, g, or t
  misc_feature (569)..(569): n is a, c, g, or t
  misc_feature (585)..(585): n is a, c, g, or t
  misc_feature (593)..(593): n is a, c, g, or t
  misc_feature (595)..(595): n is a, c, g, or t
ccttnaagttccacttagttnaacataccctggcaatattagttttagggcatagaatttaatnaattccatccacctacgtnacaacacacccagtggctcmntcaacaacmaatggcccttcttaataacnwatctnccccacctrgstcnatcccccaamacccckgtcccctccaagtaacactcagtttgttctctatggtcaaaagtctgttttctggnntgtctctnttttttttcccccatgttcattcattttgtttcttaaattccacatatgagtganagcatatggtatttgtctttctctgacttattttgcttagtataatactctctngctccacccacattctttttgatggctgagtaatattctntgtgannttgtgttacattattatccattcatcagctgatggatatttgngcttttcccataatttggctattgttgaaaatgctgctataaacattgggggtgcatgtatcctnttgagtgagtatttttgtattgctttgagtgaatacctaggatattcactaggtatnttcacaatgggccnttgctggatctcctangagagcancnaaaat

SEQ ID NO: 213410 - DNA, 600 bp, Canis familiaris
  misc_feature (18)..(18): n is a, c, g, or t
  misc_feature (20)..(20): n is a, c, g, or t
  misc_feature (23)..(23): n is a, c, g, or t
  misc_feature (32)..(33): n is a, c, g, or t
  misc_feature (44)..(44): n is a, c, g, or t
  misc_feature (47)..(47): n is a, c, g, or t
  misc_feature (49)..(49): n is a, c, g, or t
  misc_feature (52)..(52): n is a, c, g, or t
  misc_feature (54)..(54): n is a, c, g, or t
  misc_feature (72)..(74): n is a, c, g, or t
  misc_feature (78)..(78): n is a, c, g, or t
  misc_feature (84)..(84): n is a, c, g, or t
  misc_feature (94)..(94): n is a, c, g, or t
  misc_feature (99)..(99): n is a, c, g, or t
  misc_feature (107)..(107): n is a, c, g, or t
  misc_feature (114)..(114): n is a, c, g, or t
  misc_feature (130)..(130): n is a, c, g, or t
  misc_feature (134)..(134): n is a, c, g, or t
  misc_feature (141)..(142): n is a, c, g, or t
  misc_feature (145)..(145): n is a, c, g, or t
  misc_feature (163)..(163): n is a, c, g, or t
  misc_feature (173)..(173): n is a, c, g, or t
  misc_feature (182)..(182): n is a, c, g, or t
  misc_feature (216)..(216): n is a, c, g, or t
  misc_feature (282)..(282): n is a, c, g, or t
  misc_feature (289)..(289): n is a, c, g, or t
  misc_feature (311)..(311): n is a, c, g, or t
  misc_feature (505)..(505): n is a, c, g, or t
  misc_feature (507)..(507): n is a, c, g, or t
tgtgtgtgtgtgtgtgtnantcngatggagcnngtgcagtgcangananctntnttgggaagaaagctagannntgtnattcangggggaaaangtaancagctacngggtatntaggaacttcaagtantctntgcctcnnaantctcccatcttttatgtncacaaacccnccctctttntctttatccggtcmggtttatycactcggcmgrntrrttacmttgccatctkgarttccctrgggattttgcmctccactctattccagraraaaaattnattcttnatcccaattytctttatgaaanaasaacgtttatttgaaacatacctcccacctatcctttcctggagggcgttattgactctgctgcatcatctcactctgcaagacatttctccttagagaaagctcaagaaatgctcagctgcttctcataaaggaagttcaaggcaagattcagacccaccgatccagaggcctatgttgttacctccaaantntcaattctgaacggggctcctggcctaacagtctgagacacttgccaattctaaatgaatgatttgctcttccaccggcattccattgtcctt

SEQ ID NO: 213411 - DNA, 600 bp, Canis familiaris
  misc_feature (33)..(33): n is a, c, g, or t
  misc_feature (35)..(35): n is a, c, g, or t
  misc_feature (214)..(214): n is a, c, g, or t
  misc_feature (306)..(306): n is a, c, g, or t
  misc_feature (421)..(421): n is a, c, g, or t
  misc_feature (488)..(488): n is a, c, g, or t
  misc_feature (535)..(537): n is a, c, g, or t
tccaaaatatataaagaactcattcaactcaantnccaaaaaaccaatctgattaaaaatgagcagaggacctgaatagacagttttccaaagaagacatccacatggccaacagacaacatgaaaagatgttcaatatcactcatcatcagggaaatggcaaatcwaaccacaataagacctcacctcatttatctgtcagaatagctagaanaaaaagactagaaataacaagcgttwgmarggatgtgggagaaaaggaaaattgtgtggcactcttggtggggaatataaaatgggagtagnccactatggraaagtgtakggaggttcctggagaaagttaaaagtataacyacyctatgrttcmgsmatttwmctyckgggtatttatctgragraaatgrgracmcatattcmnaaaggcacgtgracccctgtgttcattgcagcattatttacaatagccaagatacagtaagcaaccngagtatccaccaatagatgaatgaatggatagagaagaagttatatnnncctgtgatattacatagacataaaaaatataacatagccttttgcaaggccacagatggtctc

SEQ ID NO: 213412 - DNA, 600 bp, Canis familiaris
  misc_feature (23)..(23): n is a, c, g, or t
  misc_feature (43)..(43): n is a, c, g, or t
  misc_feature (55)..(55): n is a, c, g, or t
  misc_feature (95)..(95): n is a, c, g, or t
  misc_feature (105)..(105): n is a, c, g, or t
  misc_feature (111)..(112): n is a, c, g, or t
  misc_feature (116)..(116): n is a, c, g, or t
  misc_feature (188)..(190): n is a, c, g, or t
  misc_feature (193)..(193): n is a, c, g, or t
  misc_feature (223)..(223): n is a, c, g, or t
  misc_feature (269)..(269): n is a, c, g, or t
  misc_feature (416)..(416): n is a, c, g, or t
  misc_feature (438)..(438): n is a, c, g, or t
  misc_feature (454)..(454): n is a, c, g, or t
  misc_feature (459)..(459): n is a, c, g, or t
  misc_feature (479)..(479): n is a, c, g, or t
  misc_feature (496)..(496): n is a, c, g, or t
  misc_feature (507)..(507): n is a, c, g, or t
  misc_feature (512)..(512): n is a, c, g, or t
  misc_feature (516)..(517): n is a, c, g, or t
  misc_feature (529)..(529): n is a, c, g, or t
  misc_feature (572)..(572): n is a, c, g, or t
acaaaaatggggtggaaggggangtgggraggtttcagccttnccaggtatagtnaagttcacmggggattaaaagttacagtcataggggaatnttagttcaanagaatnnggtnggggaccagaccaaaattggtgaagggaagtgggagttcagcattcccagggtatagtaagtcaccaggggnnntangacagcatagggaatatagtcaatagaatngtaagagcaatatgcagtaacacatggtagctacacttgtggtaangctggggtaacaacatagacctgctgaatcactatgttgtacacatgaaaccaacataacggtgtgtcaactatacttaaattttgaaaaggaactatctacagatgttaaagaacaaatttatatgttattacttggaatactttnttccgaagagattaaaagattnaaaattataaaatccngagtntcacaagtcctgccttattnacgtccacataaactancaagaccttanaaatnatcnngggcactcaganacccaagaagagagactgctatacaaatagtcctgatatctgngcctctatttacccacacactgcctaat

SEQ ID NO: 213413 - DNA, 600 bp, Canis familiaris
  misc_feature (12)..(12): n is a, c, g, or t
  misc_feature (39)..(39): n is a, c, g, or t
  misc_feature (55)..(55): n is a, c, g, or t
  misc_feature (81)..(81): n is a, c, g, or t
  misc_feature (109)..(109): n is a, c, g, or t
  misc_feature (128)..(128): n is a, c, g, or t
  misc_feature (142)..(142): n is a, c, g, or t
  misc_feature (146)..(146): n is a, c, g, or t
  misc_feature (149)..(149): n is a, c, g, or t
  misc_feature (154)..(155): n is a, c, g, or t
  misc_feature (574)..(574): n is a, c, g, or t
  misc_feature (594)..(594): n is a, c, g, or t
aatggacagacntggaacctatgtctcatctgggttctncatcccactatgtgtncattggaggacccatgttcttcaatncctggggttcagaatctcytaatggagnaattttaaagggckatcynctggtctctctgkntctnctnctctnnctytcwcaacaacacaacaacaacaacacacacaacaacaacacacaaacaggtaaccatgtaaaggtagtagatttgttcatcgttcaaattgtggtcatcttttcacaatatatatcaaaacatcaagctgtacatcttcagtatacacgctttttacatgtcaaagtcacctaaagctttaaagaaaacacaaaggccaggcaccaccccaggtgaatggaatcagaattcctggtggggaagccaggcattggttgacggaagtttcctgcgggccttggagcacccctgctttaactcactgtctctgctcttgctcatgcattgttcacaggacttttcttagtggacaaagttttccttatcctcacatttttggaggggtacctcacctggggattagacgaactgaaagngaaccaagcctggtataggnggccgg

SEQ ID NO: 213414 - DNA, 544 bp, Canis familiaris; identical to SEQ ID NO: 3307
  misc_feature (12)..(13): n is a, c, g, or t
  misc_feature (16)..(16): n is a, c, g, or t
  misc_feature (20)..(20): n is a, c, g, or t
  misc_feature (22)..(22): n is a, c, g, or t
  misc_feature (64)..(64): n is a, c, g, or t
  misc_feature (143)..(144): n is a, c, g, or t
  misc_feature (220)..(222): n is a, c, g, or t
  misc_feature (385)..(385): n is a, c, g, or t
  misc_feature (464)..(464): n is a, c, g, or t
  misc_feature (470)..(470): n is a, c, g, or t
  misc_feature (521)..(521): n is a, c, g, or t
  misc_feature (540)..(540): n is a, c, g, or t

SEQ ID NO: 213415 - DNA, 445 bp, Canis familiaris; identical to SEQ ID NO: 3308
  misc_feature (4)..(4): n is a, c, g, or t
  misc_feature (10)..(10): n is a, c, g, or t
  misc_feature (25)..(25): n is a, c, g, or t
  misc_feature (27)..(28): n is a, c, g, or t
  misc_feature (49)..(49): n is a, c, g, or t
  misc_feature (405)..(405): n is a, c, g, or t
  misc_feature (421)..(421): n is a, c, g, or t
  misc_feature (423)..(423): n is a, c, g, or t

SEQ ID NO: 213416 - DNA, 460 bp, Canis familiaris; identical to SEQ ID NO: 3309
  misc_feature (15)..(15): n is a, c, g, or t
  misc_feature (17)..(17): n is a, c, g, or t
  misc_feature (29)..(32): n is a, c, g, or t
  misc_feature (401)..(401): n is a, c, g, or t
  misc_feature (416)..(416): n is a, c, g, or t
  misc_feature (424)..(424): n is a, c, g, or t
  misc_feature (432)..(432): n is a, c, g, or t

SEQ ID NO: 213417 - DNA, 600 bp, Canis familiaris
  misc_feature (105)..(105): n is a, c, g, or t
  misc_feature (127)..(130): n is a, c, g, or t
  misc_feature (156)..(156): n is a, c, g, or t
  misc_feature (185)..(185): n is a, c, g, or t
  misc_feature (210)..(210): n is a, c, g, or t
  misc_feature (234)..(234): n is a, c, g, or t
  misc_feature (272)..(272): n is a, c, g, or t
  misc_feature (289)..(289): n is a, c, g, or t
  misc_feature (305)..(306): n is a, c, g, or t
  misc_feature (317)..(317): n is a, c, g, or t
  misc_feature (338)..(338): n is a, c, g, or t
  misc_feature (367)..(367): n is a, c, g, or t
  misc_feature (371)..(371): n is a, c, g, or t
  misc_feature (373)..(373): n is a, c, g, or t
  misc_feature (386)..(387): n is a, c, g, or t
  misc_feature (424)..(424): n is a, c, g, or t
  misc_feature (428)..(428): n is a, c, g, or t
  misc_feature (433)..(433): n is a, c, g, or t
  misc_feature (435)..(435): n is a, c, g, or t
  misc_feature (441)..(441): n is a, c, g, or t
  misc_feature (449)..(449): n is a, c, g, or t
  misc_feature (470)..(470): n is a, c, g, or t
  misc_feature (474)..(474): n is a, c, g, or t
  misc_feature (486)..(486): n is a, c, g, or t
  misc_feature (489)..(489): n is a, c, g, or t
  misc_feature (491)..(491): n is a, c, g, or t
  misc_feature (508)..(509): n is a, c, g, or t
  misc_feature (517)..(517): n is a, c, g, or t
  misc_feature (530)..(530): n is a, c, g, or t
  misc_feature (535)..(535): n is a, c, g, or t
  misc_feature (544)..(544): n is a, c, g, or t
  misc_feature (550)..(550): n is a, c, g, or t
  misc_feature (554)..(554): n is a, c, g, or t
  misc_feature (561)..(561): n is a, c, g, or t
  misc_feature (565)..(565): n is a, c, g, or t
  misc_feature (592)..(592): n is a, c, g, or t
  misc_feature (596)..(596): n is a, c, g, or t
aaacactacttcaaagggatacaagcacccttatgtttatagcagcattatttacaatgccaagagatggaagcagcccaagtgtgcatcaattgatgaatggcnaaagaagatgtggtgagtatannnntattatttggccataaaaagaatganatcttgtcatttgtaatgccatggatggnactagagggtagctagagaatatantgctaagttatgtaagttggttanagagagacaagtaccatatggactgctcatatgtggantctaagatataacacangtggagcaaaaagaannccaatgaaggngcggagaggaggaccatatgnaggacacagtactctttatactatagagnaatnanactggatggattnnccaggaggggaaagttggtgggggcttatggggttanattnggtgntngggggntttaaggnagtgggactgttgtggatggnggcnccggtgtttganccncnggttggtaccacttaannctattatnaccctggatgttnacctngcggttttnaaattnaaanccccttngganccccctcctgggtgccctttctttttngggnattg

SEQ ID NO: 213418 - DNA, 600 bp, Canis familiaris
  misc_feature (21)..(23): n is a, c, g, or t
  misc_feature (90)..(90): n is a, c, g, or t
  misc_feature (124)..(124): n is a, c, g, or t
  misc_feature (353)..(353): n is a, c, g, or t
  misc_feature (396)..(396): n is a, c, g, or t
  misc_feature (452)..(452): n is a, c, g, or t
  misc_feature (462)..(462): n is a, c, g, or t
  misc_feature (470)..(470): n is a, c, g, or t
  misc_feature (480)..(480): n is a, c, g, or t
  misc_feature (485)..(485): n is a, c, g, or t
  misc_feature (499)..(499): n is a, c, g, or t
  misc_feature (503)..(504): n is a, c, g, or t
  misc_feature (548)..(548): n is a, c, g, or t
  misc_feature (553)..(553): n is a, c, g, or t
  misc_feature (564)..(564): n is a, c, g, or t
  misc_feature (575)..(575): n is a, c, g, or t
  misc_feature (582)..(582): n is a, c, g, or t
  misc_feature (594)..(594): n is a, c, g, or t
caaatttaaaatatataatannngagccaacaggtgtgtttccccactccttcctccaaaggcctgggctccatcttcctccgacccagngtggggactgggctttcaggccctgtgcttgttncagaaactagacagtttctgaaaagtgggttcccatgtttggagaatctgggaggcagaggctgctgctctgtcccccaaatgacatctgcaaaacttgcagactgttcgcagtgaatgagaaaactgccttctctcttcaaacaggtgcatctggaaaggggacattctcacagcctcttttgggaagatagcacatggaagcgtctttatattttcccaccttgttncccaaagggaacacattgggctccccatgggagtttcatggtncttcacatcctggccacctatgtgggaaagaaaagagggggaccagaaaggggggntcctgggtgnaagggagnaaagttcagncatgncccagttccctgtntggnnccctcattcatggtcccccattggttttcccaggggaaggggancattncccatgggaancattttccgtngagaaantggaagtttccnggggtt

SEQ ID NO: 213419 - DNA, 600 bp, Canis familiaris
  misc_feature (2)..(5): n is a, c, g, or t
  misc_feature (13)..(13): n is a, c, g, or t
  misc_feature (57)..(57): n is a, c, g, or t
  misc_feature (69)..(69): n is a, c, g, or t
  misc_feature (97)..(97): n is a, c, g, or t
  misc_feature (99)..(99): n is a, c, g, or t
  misc_feature (569)..(569): n is a, c, g, or t
  misc_feature (577)..(577): n is a, c, g, or t
  misc_feature (579)..(579): n is a, c, g, or t
  misc_feature (583)..(583): n is a, c, g, or t
  misc_feature (586)..(586): n is a, c, g, or t
tnnnncctatatnacgtaagttggccagatacggacctgagggcgccgttaataaantttagaaggtangggggaaggagtgtgtagcacaaggaangngtatttgttggtttttgtttaaggaaatgtaaaactgcacttagtttcaaaactttatgtttcccagtctctggtttgtattttaattttctttccaagggctatatgcataattaggattcctaaatgttcaggaataatttctaatggcaaagaaggaaaaatgttttagcagctataagaaaatgttagtgagtttaatacctagcaaatcccaccctccttttaactttctaacacttatggcacacataaaatcagcttgagaagtagaaaggtctcctccacataggttcccaaggagtttgaccttgatgctccactctcctgattaaatgtttgcactgaataatgaatcttccaagaatcaagctcctaaatggatgggacactaatactgcaccattttttcttcctgtgtggaccaccatgaatctcaaggtgactctttcagaatggaataatttatngttgctananattnacnggccaggtttggtc

SEQ ID NO: 213420 - DNA, 600 bp, Canis familiaris
  misc_feature (77)..(77): n is a, c, g, or t
  misc_feature (89)..(89): n is a, c, g, or t
  misc_feature (147)..(147): n is a, c, g, or t
  misc_feature (281)..(283): n is a, c, g, or t
  misc_feature (578)..(578): n is a, c, g, or t
  misc_feature (581)..(581): n is a, c, g, or t
  misc_feature (588)..(588): n is a, c, g, or t
cccaggtctggagcagttggaataaatttcccacctggaattcttaaatatgtagttcttagccataacatgttaanggaaacaggatnacagtttagaaattcccaagcaaggaaattatggaaaaccactgtgsmaaaayttaancrggataatgggctggttaaagttttcaacacagtctgtaatcctaaaggcacggatgtagggtgacagttatctctgcaggtatataaagatggtaatagatgggtgtgttcaagtttctcaggggtcaaatnnnatacacaaagcatttcacaaggcattggcctaagcctaacttctattataggaaccccaacagatttgtcatgccccaaataatcctaagggcaaccattattaagtacacattacatgtcagtcacttgctaggtgctttacttgggtggtctcaacctgggaatccaagagtagtgcatgagttaggttttgctttgtagtaatatcctaacctcagcagtttacaacaacaaacatcttatttttctcactcatggcgctgtgggtcacctagggcaattctgtatcagggnccncctcagntctcctatgtgg

SEQ ID NO: 213421 - DNA, 475 bp, Canis familiaris; identical to SEQ ID NO: 3314
  misc_feature (39)..(39): n is a, c, g, or t
  misc_feature (46)..(47): n is a, c, g, or t
  misc_feature (108)..(108): n is a, c, g, or t
  misc_feature (199)..(199): n is a, c, g, or t
  misc_feature (461)..(461): n is a, c, g, or t

SEQ ID NO: 213422 - DNA, 423 bp, Canis familiaris; identical to SEQ ID NO: 3315
  misc_feature (159)..(159): n is a, c, g, or t
  misc_feature (163)..(163): n is a, c, g, or t
  misc_feature (393)..(393): n is a, c, g, or t
  misc_feature (408)..(408): n is a, c, g, or t
  misc_feature (415)..(415): n is a, c, g, or t
  misc_feature (422)..(422): n is a, c, g, or t

SEQ ID NO: 213423 - DNA, 600 bp, Canis familiaris
  misc_feature (31)..(31): n is a, c, g, or t
  misc_feature (60)..(60): n is a, c, g, or t
  misc_feature (73)..(73): n is a, c, g, or t
  misc_feature (87)..(87): n is a, c, g, or t
  misc_feature (96)..(96): n is a, c, g, or t
  misc_feature (101)..(101): n is a, c, g, or t
  misc_feature (112)..(112): n is a, c, g, or t
  misc_feature (116)..(116): n is a, c, g, or t
  misc_feature (256)..(256): n is a, c, g, or t
  misc_feature (299)..(299): n is a, c, g, or t
  misc_feature (303)..(303): n is a, c, g, or t
  misc_feature (369)..(369): n is a, c, g, or t
  misc_feature (518)..(518): n is a, c, g, or t
  misc_feature (559)..(559): n is a, c, g, or t
  misc_feature (585)..(586): n is a, c, g, or t
ggaatggaaaaaagaaagaaagtacaaaganggcaggaawatcytcmgagtgtgtgtgcntgtgtgtgtgwcngtgtgtgtgtgtgngtgtgtgtntctgnacctaggacmnttgnatawaacttagtgtttattaactaccttgggggctggaacatttttgctaatctgatgaaagctcggtctttaaaaaaatgtacatatatggaaatttcaggaacatcacacacttcctgacacccatgtcaaggacctntggtatagtcataaactttttaaactacttttataaataagcnggtnaaaaaaaaatcatctaaaagaaatgagagacctaagagggagtcttgattttgcccctaaagggtngtgtgaatctaaataaatcatctaagcttgctccctccagctttttcacaaagtgaaatttttatccacccatagaacaaggtgggtaatgtttttacaattttgtgaaacacaaaagatggaaagtcaatgaatatatgggaaagtantttgagaacttaagatttattattagggatgtgaagaattntcttaagtgggccggaattgatccgnngtgagccggcaaaa

SEQ ID NO: 213424 - DNA, 600 bp, Canis familiaris
  misc_feature (99)..(99): n is a, c, g, or t
  misc_feature (112)..(112): n is a, c, g, or t
  misc_feature (122)..(122): n is a, c, g, or t
  misc_feature (133)..(133): n is a, c, g, or t
  misc_feature (584)..(584): n is a, c, g, or t
  misc_feature (587)..(587): n is a, c, g, or t
  misc_feature (595)..(595): n is a, c, g, or t
tagacgccacatgttagtgaaatcatatggtatttgtcatctctttctgacttatttcacctggccataaacttcccccaaggtcccacccatgttgtncaacacatggatnaagcttttcnttctttttatnatatatggcaacacaacaacaacacaacacaacaacaacacccattttcctttaatctgttcatccatcagtggatacttgggttatttccatgtttggctattgtaaataatgctgcagtgaacatgggggtagagatacctttttgtgttagtgtttttatttcctttagataaatacccagaagtagaataggaacctccatagtgttttccatagtggctacaccaatttgcgtttccatcaataccacacaagagttccttttttccacatcctcgccaacatttctagtttcttatctttttggtaacagccattctagcagatgtgagatgatacctcattgtggttttgatttgcatttccctgatgatgagtgatggtgaacaccttttctatgtacctattggacatctatattttcttctttggcagggccttttctgtnatncttgcgangcaaa

SEQ ID NO: 213425 - DNA, 600 bp, Canis familiaris
  misc_feature (2)..(2): n is a, c, g, or t
  misc_feature (63)..(63): n is a, c, g, or t
  misc_feature (69)..(69): n is a, c, g, or t
  misc_feature (375)..(375): n is a, c, g, or t
  misc_feature (413)..(413): n is a, c, g, or t
  misc_feature (437)..(437): n is a, c, g, or t
  misc_feature (456)..(457): n is a, c, g, or t
  misc_feature (465)..(465): n is a, c, g, or t
  misc_feature (480)..(480): n is a, c, g, or t
  misc_feature (500)..(500): n is a, c, g, or t
  misc_feature (531)..(531): n is a, c, g, or t
  misc_feature (555)..(555): n is a, c, g, or t
  misc_feature (558)..(559): n is a, c, g, or t
  misc_feature (579)..(582): n is a, c, g, or t
  misc_feature (589)..(589): n is a, c, g, or t
  misc_feature (593)..(593): n is a, c, g, or t
  misc_feature (595)..(595): n is a, c, g, or t
  misc_feature (597)..(597): n is a, c, g, or t
tnaaagctttcgatttcattttaaaaaatccatttcaaaggacmttagtggggtccacagaantctgtnccattggtggcttacgtaaaaggaccagttgcgccatataatggccaatgagattttttctgaagattaaagaagattctcaaatcaaaaaatggcagaagcacagagttcttattttatgagtaagtgcccaggggaaaatggcctccttgtgcttcaaagttcttcatcgctggaaagctgaaaagtagaaagaaaatagcctgtaaacgtgtgtgcacgtgcgtgtatatacatgtatatacacacacacacacacacacaaaatataccaacatcacacgtacatgtgatacccacctgtanacgcaggtgcatacgcatctaccacaggcatgtgcacntggatacatatgtgcacacatatncacacacgtcaagtggttnngcttctgnacgcaacacagatanaggaagtaaaggaatggcanacacctgggttttctgatgggatggaacttngagccggagctcagaaagctcgtntcnntcgggccacatgatttaccnnnngagccanaatnancnact

SEQ ID NO: 213426 - DNA, 600 bp, Canis familiaris
  misc_feature (13)..(13): n is a, c, g, or t
  misc_feature (189)..(189): n is a, c, g, or t
  misc_feature (220)..(220): n is a, c, g, or t
  misc_feature (236)..(236): n is a, c, g, or t
  misc_feature (272)..(272): n is a, c, g, or t
  misc_feature (574)..(574): n is a, c, g, or t
  misc_feature (587)..(587): n is a, c, g, or t
tatctccacttcnccaatgaaggaactgaggttcatagaggttagcataacctcccctagactgcggttgcgacaggcgtggaactcaggactttcaactacctcgrggcatcagttgattccccagttcacaattggctatgttcccagcaaactycacaaaaacttcccactttacatctctagasnaacacacacacacacacacacacacacacanacacacacacacacgncatccttcatccattaattcmtcttttaatgsmttncaacaagtgattatggratgctactctttgtcagattgctacgtaaattacatacatttggcaaataggaacttactcaattcctatcaccactatggaagatactgttaacatttttattttacttaagagaaaaccagaatcagagacctctgagcttctatcacagagctagaaatagctggtgaggttttcagataatgccctagaaatgtagactttttaagacataccccctttgtaaggaaattgtgtggattcaatgttgtttgaacttttcgtcattgcgttatattcccaangtggttccttggntcgggccttgtat

SEQ ID NO: 213427 - DNA, 598 bp, Canis familiaris; identical to SEQ ID NO: 3320
  misc_feature (13)..(13): n is a, c, g, or t
  misc_feature (232)..(232): n is a, c, g, or t
  misc_feature (257)..(257): n is a, c, g, or t
  misc_feature (405)..(405): n is a, c, g, or t
  misc_feature (432)..(432): n is a, c, g, or t
  misc_feature (440)..(440): n is a, c, g, or t
  misc_feature (445)..(445): n is a, c, g, or t
  misc_feature (476)..(476): n is a, c, g, or t
  misc_feature (495)..(495): n is a, c, g, or t
  misc_feature (549)..(549): n is a, c, g, or t
  misc_feature (569)..(569): n is a, c, g, or t
  misc_feature (585)..(585): n is a, c, g, or t

SEQ ID NO: 213428 - DNA, 600 bp, Canis familiaris; identical to SEQ ID NO: 3321
  misc_feature (5)..(5): n is a, c, g, or t
  misc_feature (35)..(35): n is a, c, g, or t
  misc_feature (161)..(161): n is a, c, g, or t
  misc_feature (179)..(179): n is a, c, g, or t
  misc_feature (218)..(218): n is a, c, g, or t
  misc_feature (369)..(370): n is a, c, g, or t
  misc_feature (423)..(423): n is a, c, g, or t
  misc_feature (463)..(463): n is a, c, g, or t
  misc_feature (472)..(472): n is a, c, g, or t
  misc_feature (510)..(510): n is a, c, g, or t
  misc_feature (517)..(517): n is a, c, g, or t
  misc_feature (543)..(543): n is a, c, g, or t
  misc_feature (550)..(550): n is a, c, g, or t
  misc_feature (554)..(554): n is a, c, g, or t
  misc_feature (569)..(569): n is a, c, g, or t
  misc_feature (586)..(586): n is a, c, g, or t
  misc_feature (588)..(588): n is a, c, g, or t
  misc_feature (593)..(593): n is a, c, g, or t

SEQ ID NO: 213429 - DNA, 591 bp, Canis familiaris; identical to SEQ ID NO: 3322
  misc_feature (9)..(9): n is a, c, g, or t
  misc_feature (12)..(12): n is a, c, g, or t
  misc_feature (14)..(14): n is a, c, g, or t
  misc_feature (25)..(25): n is a, c, g, or t
  misc_feature (28)..(28): n is a, c, g, or t
  misc_feature (58)..(58): n is a, c, g, or t
  misc_feature (73)..(73): n is a, c, g, or t
  misc_feature (76)..(76): n is a, c, g, or t
  misc_feature (81)..(81): n is a, c, g, or t
  misc_feature (96)..(96): n is a, c, g, or t
  misc_feature (115)..(115): n is a, c, g, or t
  misc_feature (132)..(132): n is a, c, g, or t
  misc_feature (135)..(135): n is a, c, g, or t
  misc_feature (146)..(146): n is a, c, g, or t
  misc_feature (154)..(154): n is a, c, g, or t
  misc_feature (183)..(183): n is a, c, g, or t
  misc_feature (188)..(188): n is a, c, g, or t
  misc_feature (213)..(213): n is a, c, g, or t
  misc_feature (220)..(220): n is a, c, g, or t
  misc_feature (288)..(288): n is a, c, g, or t
  misc_feature (299)..(299): n is a, c, g, or t
  misc_feature (326)..(326): n is a, c, g, or t
  misc_feature (351)..(351): n is a, c, g, or t
  misc_feature (394)..(395): n is a, c, g, or t
  misc_feature (414)..(414): n is a, c, g, or t
  misc_feature (547)..(547): n is a, c, g, or t
  misc_feature (580)..(580): n is a, c, g, or t
  misc_feature (582)..(582): n is a, c, g, or t

SEQ ID NO: 213430 - DNA, 600 bp, Canis familiaris
  misc_feature (49)..(49): n is a, c, g, or t
  misc_feature (57)..(58): n is a, c, g, or t
  misc_feature (74)..(74): n is a, c, g, or t
  misc_feature (93)..(93): n is a, c, g, or t
  misc_feature (99)..(99): n is a, c, g, or t
  misc_feature (107)..(107): n is a, c, g, or t
  misc_feature (118)..(118): n is a, c, g, or t
  misc_feature (121)..(121): n is a, c, g, or t
  misc_feature (128)..(128): n is a, c, g, or t
  misc_feature (132)..(132): n is a, c, g, or t
  misc_feature (135)..(135): n is a, c, g, or t
  misc_feature (140)..(140): n is a, c, g, or t
  misc_feature (157)..(157): n is a, c, g, or t
  misc_feature (160)..(160): n is a, c, g, or t
  misc_feature (163)..(163): n is a, c, g, or t
  misc_feature (166)..(166): n is a, c, g, or t
  misc_feature (177)..(177): n is a, c, g, or t
  misc_feature (194)..(194): n is a, c, g, or t
  misc_feature (221)..(221): n is a, c, g, or t
  misc_feature (230)..(230): n is a, c, g, or t
  misc_feature (252)..(252): n is a, c, g, or t
  misc_feature (258)..(258): n is a, c, g, or t
  misc_feature (265)..(265): n is a, c, g, or t
  misc_feature (286)..(286): n is a, c, g, or t
  misc_feature (290)..(290): n is a, c, g, or t
  misc_feature (294)..(294): n is a, c, g, or t
  misc_feature (298)..(298): n is a, c, g, or t
  misc_feature (311)..(313): n is a, c, g, or t
  misc_feature (316)..(316): n is a, c, g, or t
  misc_feature (331)..(332): n is a, c, g, or t
  misc_feature (339)..(339): n is a, c, g, or t
  misc_feature (342)..(342): n is a, c, g, or t
  misc_feature (348)..(349): n is a, c, g, or t
  misc_feature (357)..(357): n is a, c, g, or t
  misc_feature (363)..(363): n is a, c, g, or t
  misc_feature (367)..(367): n is a, c, g, or t
  misc_feature (374)..(374): n is a, c, g, or t
  misc_feature (385)..(385): n is a, c, g, or t
  misc_feature (388)..(389): n is a, c, g, or t
  misc_feature (396)..(399): n is a, c, g, or t
  misc_feature (403)..(403): n is a, c, g, or t
  misc_feature (407)..(408): n is a, c, g, or t
  misc_feature (415)..(416): n is a, c, g, or t
  misc_feature (421)..(421): n is a, c, g, or t
  misc_feature (424)..(425): n is a, c, g, or t
  misc_feature (435)..(435): n is a, c, g, or t
  misc_feature (437)..(437): n is a, c, g, or t
  misc_feature (444)..(444): n is a, c, g, or t
  misc_feature (448)..(448): n is a, c, g, or t
  misc_feature (459)..(459): n is a, c, g, or t
  misc_feature (464)..(464): n is a, c, g, or t
  misc_feature (469)..(475): n is a, c, g, or t
  misc_feature (506)..(506): n is a, c, g, or t
  misc_feature (563)..(563): n is a, c, g, or t
  misc_feature (567)..(567): n is a, c, g, or t
  misc_feature (571)..(571): n is a, c, g, or t
  misc_feature (575)..(575): n is a, c, g, or t
  misc_feature (583)..(583): n is a, c, g, or t
  misc_feature (587)..(588): n is a, c, g, or t
  misc_feature (593)..(593): n is a, c, g, or t
  misc_feature (596)..(596): n is a, c, g, or t
taggaataaatttaaggaaatgaaaaatctggcacactggaaagctgtnaagactgnnaaggaggacacaaatnaaatgggaaagatcttctnacactncactaatnaagaaaaattnaanattgttnaaangtnccgtnactaccaaaagctatcncanagnttncacggcagttncccacaaaacttcccanggatacttttcacagaattggaaggtnactgcggtncccacacaaaatccactgatanttttcncagagantgaggagagagtcccaaaacntgtntggngtcncacaaagaccccnnnatngccacagcaatcttnngtaagangancacagnnggagcgcnacacancccngcacacnatgtgagcagngtnntagttcnnnnaccncccnnagtgtgnntggancannatagagagcncngagatanatanataactgcgtnttcantcgannnnnnncatgcacgcactgtattccagggaatacatnacccttcaagttgcacgtgcctataaaaatttttctctgggagttgaattccagctntggnccgngccntaaaggtntatnncttgnganggca

SEQ ID NO: 213431 - DNA, 600 bp, Canis familiaris
  misc_feature (8)..(8): n is a, c, g, or t
  misc_feature (70)..(70): n is a, c, g, or t
  misc_feature (134)..(138): n is a, c, g, or t
  misc_feature (218)..(218): n is a, c, g, or t
  misc_feature (313)..(314): n is a, c, g, or t
  misc_feature (338)..(338): n is a, c, g, or t
  misc_feature (349)..(349): n is a, c, g, or t
  misc_feature (356)..(356): n is a, c, g, or t
  misc_feature (368)..(368): n is a, c, g, or t
  misc_feature (391)..(391): n is a, c, g, or t
  misc_feature (408)..(409): n is a, c, g, or t
  misc_feature (460)..(460): n is a, c, g, or t
  misc_feature (494)..(494): n is a, c, g, or t
  misc_feature (519)..(522): n is a, c, g, or t
  misc_feature (573)..(573): n is a, c, g, or t
  misc_feature (589)..(589): n is a, c, g, or t
ttttttgnacatagagaaggccagttattctttcatttagttaagaaattgagacagagaattaaaatanatggaatgagattaggtatcagtgtaataccatattatttatgccatggtattagtagagtccnnnnntcttttcttttggaaacaacatatgggatactgaagagagggagggtaagaaaactaatttttctggtgagatattagtnactatgttaagcaatttaaatgaatttaaattaaatatgattatttagaaaaagatgcttaataacataaaaaagattactataacattttgtgnnaaagtactatgcaatctctaacanataaaatacanaatacanagaagaaagccntatatattatataaaaaaatcanatttattataaagcccnnaatctatacaatgtgaaccccgcccaataatctagactcattacttaaccnttacttttccttgcttccctagtctgcaaagcangcatagcgtgcacatgcgtgcgcgnnnntataacgaatgaggtcacattaagtgcatttcatttgctttgctcactgtntctgctctttgcagtngggccccaggc

SEQ ID NO: 213432 - DNA, 600 bp, Canis familiaris; identical to SEQ ID NO: 3325
  misc_feature (5)..(5): n is a, c, g, or t
  misc_feature (7)..(7): n is a, c, g, or t
  misc_feature (12)..(12): n is a, c, g, or t
  misc_feature (14)..(14): n is a, c, g, or t
  misc_feature (223)..(223): n is a, c, g, or t
  misc_feature (421)..(421): n is a, c, g, or t
  misc_feature (434)..(434): n is a, c, g, or t
  misc_feature (490)..(490): n is a, c, g, or t
  misc_feature (544)..(544): n is a, c, g, or t
  misc_feature (557)..(557): n is a, c, g, or t
  misc_feature (585)..(585): n is a, c, g, or t

SEQ ID NO: 213433 - DNA, 500 bp, Canis familiaris; identical to SEQ ID NO: 3326
  misc_feature (2)..(2): n is a, c, g, or t
  misc_feature (7)..(7): n is a, c, g, or t
  misc_feature (23)..(23): n is a, c, g, or t
  misc_feature (26)..(26): n is a, c, g, or t
  misc_feature (63)..(63): n is a, c, g, or t
  misc_feature (79)..(79): n is a, c, g, or t
  misc_feature (104)..(104): n is a, c, g, or t
  misc_feature (136)..(136): n is a, c, g, or t
  misc_feature (158)..(158): n is a, c, g, or t
  misc_feature (161)..(161): n is a, c, g, or t
  misc_feature (175)..(175): n is a, c, g, or t
  misc_feature (195)..(195): n is a, c, g, or t
  misc_feature (202)..(202): n is a, c, g, or t
  misc_feature (215)..(215): n is a, c, g, or t
  misc_feature (220)..(220): n is a, c, g, or t
  misc_feature (243)..(243): n is a, c, g, or t
  misc_feature (246)..(247): n is a, c, g, or t
  misc_feature (276)..(276): n is a, c, g, or t
  misc_feature (279)..(279): n is a, c, g, or t
  misc_feature (286)..(286): n is a, c, g, or t
  misc_feature (288)..(288): n is a, c, g, or t
  misc_feature (291)..(291): n is a, c, g, or t
  misc_feature (315)..(315): n is a, c, g, or t
  misc_feature (342)..(342): n is a, c, g, or t
  misc_feature (411)..(411): n is a, c, g, or t
  misc_feature (449)..(449): n is a, c, g, or t
  misc_feature (457)..(457): n is a, c, g, or t
  misc_feature (464)..(464): n is a, c, g, or t
  misc_feature (477)..(477): n is a, c, g, or t
  misc_feature (490)..(490): n is a, c, g, or t
  misc_feature (498)..(498): n is a, c, g, or t

SEQ ID NO: 213434 - DNA, 600 bp, Canis familiaris
  misc_feature (2)..(4): n is a, c, g, or t
  misc_feature (6)..(6): n is a, c, g, or t
  misc_feature (19)..(19): n is a, c, g, or t
  misc_feature (30)..(30): n is a, c, g, or t
  misc_feature (42)..(42): n is a, c, g, or t
  misc_feature (97)..(97): n is a, c, g, or t
  misc_feature (112)..(112): n is a, c, g, or t
  misc_feature (182)..(182): n is a, c, g, or t
  misc_feature (217)..(217): n is a, c, g, or t
  misc_feature (252)..(252): n is a, c, g, or t
  misc_feature (262)..(262): n is a, c, g, or t
  misc_feature (327)..(327): n is a, c, g, or t
  misc_feature (363)..(365): n is a, c, g, or t
  misc_feature (380)..(383): n is a, c, g, or t
gnnntnctcgcatccaganaatacgtgctncatagacacgcncggaatgaaacatgtgattagaacttkggyarcackgatgtacaatactatactnacttkttctgraaangtgccytttaaagtgtggramgctgggatcttaggaggmcacakgaaactcaaccttgttggscagtganacgtcmagccaatgtagtcttcctcmaaaattgcnatttcytkaargtttwaaaagtttaggatttygrnggccyrcacntacgggwwaataattgcccctcttacgggaggtccctaacatccattaacgcacaacttcatctnttgtgaatcattgtgacattatgataataaagaaannnctacgtgtgtgtttnnnncagaccacatacaaatggcagctgtgagaacactcttctgaactccgtcctttctaaattcaagatacatgttgcaaagtcgcctcatgtgaaggtccaatatgaatttggacgtgtgtacacatacaaaggaatggagacagaagctctcgtcatagaccaatgaggaaaagaagagtaaatgggttggccagatcctctagagtcgacgtggcgc

SEQ ID NO: 213435 - DNA, 566 bp, Canis familiaris; identical to SEQ ID NO: 3328
  misc_feature (141)..(142): n is a, c, g, or t
  misc_feature (194)..(194): n is a, c, g, or t
  misc_feature (196)..(197): n is a, c, g, or t
  misc_feature (358)..(358): n is a, c, g, or t
  misc_feature (379)..(379): n is a, c, g, or t
  misc_feature (404)..(404): n is a, c, g, or t
  misc_feature (423)..(423): n is a, c, g, or t
  misc_feature (448)..(448): n is a, c, g, or t
  misc_feature (469)..(469): n is a, c, g, or t
  misc_feature (471)..(473): n is a, c, g, or t
  misc_feature (476)..(476): n is a, c, g, or t
  misc_feature (484)..(484): n is a, c, g, or t
  misc_feature (486)..(486): n is a, c, g, or t
  misc_feature (489)..(489): n is a, c, g, or t
  misc_feature (495)..(495): n is a, c, g, or t
  misc_feature (499)..(499): n is a, c, g, or t
  misc_feature (508)..(509): n is a, c, g, or t
  misc_feature (518)..(518): n is a, c, g, or t
  misc_feature (521)..(522): n is a, c, g, or t
  misc_feature (542)..(542): n is a, c, g, or t
  misc_feature (545)..(545): n is a, c, g, or t
  misc_feature (551)..(551): n is a, c, g, or t
  misc_feature (555)..(555): n is a, c, g, or t
  misc_feature (560)..(560): n is a, c, g, or t

SEQ ID NO: 213436 - DNA, 470 bp, Canis familiaris; identical to SEQ ID NO: 3329
  misc_feature (8)..(9): n is a, c, g, or t
  misc_feature (11)..(11): n is a, c, g, or t
  misc_feature (13)..(13): n is a, c, g, or t
  misc_feature (15)..(15): n is a, c, g, or t
  misc_feature (21)..(22): n is a, c, g, or t
  misc_feature (24)..(24): n is a, c, g, or t
  misc_feature (29)..(29): n is a, c, g, or t
  misc_feature (31)..(32): n is a, c, g, or t
  misc_feature (41)..(41): n is a, c, g, or t
  misc_feature (44)..(45): n is a, c, g, or t
  misc_feature (158)..(158): n is a, c, g, or t
  misc_feature (165)..(165): n is a, c, g, or t
  misc_feature (198)..(198): n is a, c, g, or t
  misc_feature (241)..(243): n is a, c, g, or t
  misc_feature (287)..(287): n is a, c, g, or t
  misc_feature (396)..(396): n is a, c, g, or t
  misc_feature (430)..(430): n is a, c, g, or t

SEQ ID NO: 213437 - DNA, 600 bp, Canis familiaris
  misc_feature (1)..(1): n is a, c, g, or t
  misc_feature (103)..(103): n is a, c, g, or t
  misc_feature (105)..(108): n is a, c, g, or t
  misc_feature (123)..(123): n is a, c, g, or t
  misc_feature (133)..(136): n is a, c, g, or t
  misc_feature (336)..(336): n is a, c, g, or t
  misc_feature (414)..(414): n is a, c, g, or t
  misc_feature (430)..(430): n is a, c, g, or t
  misc_feature (450)..(450): n is a, c, g, or t
  misc_feature (459)..(459): n is a, c, g, or t
  misc_feature (474)..(474): n is a, c, g, or t
  misc_feature (476)..(476): n is a, c, g, or t
  misc_feature (480)..(480): n is a, c, g, or t
  misc_feature (484)..(484): n is a, c, g, or t
  misc_feature (492)..(492): n is a, c, g, or t
  misc_feature (525)..(525): n is a, c, g, or t
  misc_feature (530)..(530): n is a, c, g, or t
  misc_feature (554)..(554): n is a, c, g, or t
  misc_feature (558)..(559): n is a, c, g, or t
  misc_feature (573)..(573): n is a, c, g, or t
  misc_feature (580)..(580): n is a, c, g, or t
natagaatatttacaacaatgacattcaatgaggtactgttacctgcaacaatacagataaatcgcaaataaaatgttgaccactaaaccagaagagaaaaantnnnnactgtatgattcaanttatatcaannnnaaaacgatagcccaagaatcagtgtcaagaaaataaagtgtctctaggataaagtgatacaactacagaagggctgaacacaacagtctgggaaaaattcctggcttgtggtttggagctctctcccttttctaacaacccctgttataacactggaaattcaaaactttaaagtgggacagtggaaaggatttaaggantaaaaacttttcaaggatggttagaggaaaacttaggaataaacttttacattaagtactttaaataggatgtaaaanttttaaaggtggaaantaatttggaattttaaaatngggccccgntaaagggtaaacttntncttngganttaatccnggattgggctccaacctgggtttaaacgggacnggggnttaaaaggccgggtggttttttangggnntttccaggggtttnaggcctntggggggccccaaccttttt

SEQ ID NO: 213438 - DNA, 339 bp, Canis familiaris; identical to SEQ ID NO: 3331
  misc_feature (4)..(5): n is a, c, g, or t
  misc_feature (10)..(10): n is a, c, g, or t
  misc_feature (21)..(22): n is a, c, g, or t
  misc_feature (41)..(41): n is a, c, g, or t
  misc_feature (45)..(45): n is a, c, g, or t
  misc_feature (53)..(53): n is a, c, g, or t
  misc_feature (314)..(314): n is a, c, g, or t
  misc_feature (321)..(321): n is a, c, g, or t

SEQ ID NO: 213439 - DNA, 368 bp, Canis familiaris; identical to SEQ ID NO: 3332
  misc_feature (4)..(4): n is a, c, g, or t
  misc_feature (14)..(14): n is a, c, g, or t
  misc_feature (150)..(153): n is a, c, g, or t
  misc_feature (223)..(223): n is a, c, g, or t
  misc_feature (284)..(284): n is a, c, g, or t
  misc_feature (329)..(329): n is a, c, g, or t
  misc_feature (338)..(338): n is a, c, g, or t

SEQ ID NO: 213440 - DNA, 497 bp, Canis familiaris; identical to SEQ ID NO: 3333
  misc_feature (35)..(35): n is a, c, g, or t
  misc_feature (196)..(196): n is a, c, g, or t
  misc_feature (198)..(198): n is a, c, g, or t
  misc_feature (377)..(377): n is a, c, g, or t
  misc_feature (399)..(399): n is a, c, g, or t
  misc_feature (416)..(417): n is a, c, g, or t
  misc_feature (454)..(454): n is a, c, g, or t
  misc_feature (459)..(459): n is a, c, g, or t
  misc_feature (475)..(477): n is a, c, g, or t

SEQ ID NO: 213441 - DNA, 450 bp, Canis familiaris; identical to SEQ ID NO: 3334
  misc_feature (4)..(4): n is a, c, g, or t
  misc_feature (8)..(9): n is a, c, g, or t
  misc_feature (32)..(32): n is a, c, g, or t
  misc_feature (46)..(46): n is a, c, g, or t
  misc_feature (48)..(48): n is a, c, g, or t
  misc_feature (79)..(79): n is a, c, g, or t
  misc_feature (83)..(83): n is a, c, g, or t
  misc_feature (90)..(90): n is a, c, g, or t
  misc_feature (117)..(117): n is a, c, g, or t
  misc_feature (146)..(146): n is a, c, g, or t
  misc_feature (153)..(153): n is a, c, g, or t
  misc_feature (177)..(177): n is a, c, g, or t
  misc_feature (187)..(187): n is a, c, g, or t
  misc_feature (191)..(191): n is a, c, g, or t
  misc_feature (194)..(194): n is a, c, g, or t
  misc_feature (199)..(199): n is a, c, g, or t
  misc_feature (205)..(205): n is a, c, g, or t
  misc_feature (209)..(209): n is a, c, g, or t
  misc_feature (217)..(217): n is a, c, g, or t
  misc_feature (224)..(224): n is a, c, g, or t
  misc_feature (237)..(237): n is a, c, g, or t
  misc_feature (248)..(248): n is a, c, g, or t
  misc_feature (254)..(254): n is a, c, g, or t
  misc_feature (265)..(265): n is a, c, g, or t
  misc_feature (267)..(267): n is a, c, g, or t
  misc_feature (273)..(273): n is a, c, g, or t
  misc_feature (279)..(279): n is a, c, g, or t
  misc_feature (284)..(284): n is a, c, g, or t
  misc_feature (290)..(291): n is a, c, g, or t
  misc_feature (316)..(316): n is a, c, g, or t
  misc_feature (320)..(320): n is a, c, g, or t
  misc_feature (323)..(323): n is a, c, g, or t
  misc_feature (333)..(334): n is a, c, g, or t
  misc_feature (444)..(444): n is a, c, g, or t

SEQ ID NO: 213442 - DNA, 585 bp, Canis familiaris; identical to SEQ ID NO: 3335
  misc_feature (53)..(53): n is a, c, g, or t
  misc_feature (61)..(61): n is a, c, g, or t
  misc_feature (126)..(126): n is a, c, g, or t
  misc_feature (136)..(138): n is a, c, g, or t
  misc_feature (191)..(191): n is a, c, g, or t
  misc_feature (345)..(345): n is a, c, g, or t
  misc_feature (360)..(360): n is a, c, g, or t
  misc_feature (377)..(377): n is a, c, g, or t
  misc_feature (389)..(389): n is a, c, g, or t
  misc_feature (401)..(401): n is a, c, g, or t
  misc_feature (409)..(409): n is a, c, g, or t
  misc_feature (427)..(427): n is a, c, g, or t
  misc_feature (463)..(463): n is a, c, g, or t
  misc_feature (469)..(469): n is a, c, g, or t
  misc_feature (475)..(475): n is a, c, g, or t
  misc_feature (520)..(521): n is a, c, g, or t
  misc_feature (547)..(547): n is a, c, g, or t
  misc_feature (552)..(552): n is a, c, g, or t
  misc_feature (565)..(565): n is a, c, g, or t
  misc_feature (583)..(583): n is a, c, g, or t

SEQ ID NO: 213443 - DNA, 368 bp, Canis familiaris; identical to SEQ ID NO: 3336
  misc_feature (29)..(29): n is a, c, g, or t
  misc_feature (133)..(134): n is a, c, g, or t
  misc_feature (140)..(140): n is a, c, g, or t
  misc_feature (307)..(307): n is a, c, g, or t
  misc_feature (314)..(314): n is a, c, g, or t
  misc_feature (318)..(318): n is a, c, g, or t
  misc_feature (355)..(355): n is a, c, g, or t

SEQ ID NO: 213444 - DNA, 473 bp, Canis familiaris; identical to SEQ ID NO: 3337
  misc_feature (2)..(2): n is a, c, g, or t
  misc_feature (415)..(415): n is a, c, g, or t
  misc_feature (423)..(423): n is a, c, g, or t
  misc_feature (431)..(431): n is a, c, g, or t
  misc_feature (438)..(438): n is a, c, g, or t
  misc_feature (446)..(448): n is a, c, g, or t
  misc_feature (466)..(468): n is a, c, g, or t

SEQ ID NO: 213445 - DNA, 600 bp, Canis familiaris
  misc_feature (32)..(32): n is a, c, g, or t
  misc_feature (85)..(85): n is a, c, g, or t
  misc_feature (103)..(103): n is a, c, g, or t
  misc_feature (139)..(140): n is a, c, g, or t
  misc_feature (158)..(158): n is a, c, g, or t
  misc_feature (282)..(286): n is a, c, g, or t
  misc_feature (374)..(374): n is a, c, g, or t
  misc_feature (412)..(412): n is a, c, g, or t
  misc_feature (472)..(474): n is a, c, g, or t
  misc_feature (572)..(572): n is a, c, g, or t
cgagtcaggggatagaaatattatatattccngactttggaagaggttggatatggtcaaaaatagattaaagcagcaaagtaanttatctcaataatttacngccagggaagcaattaacaatcttyctatttgtggnnagcamttcccaacaactnagagagakgtgtgtaacagtttggcattttaaaggcgttttgattccycagtccmwcmattgtcccaayccccaaattggtcaatttgggataacattaattcaggctgtaaagatggccctcnnnnnggaaggaaagaaggaggcgggagggaaggaattggatagatatgaggtatcccctggagttagttattgaataggtccttgcaaatcntggtcggttgcattgctttgttggcttgttgccttatntattttgttcctgaagtggttgctacaaaaaccctgacacaaacctctgaagagtgattnnnactcgcgcatggtccagaattgtgttattttaacaaaactttctagttcttgttgatttgggactctgaccccctgtatgtcgatatctagagcaacntcccaccattttgatgggcctcttgatc

SEQ ID NO: 213446 - DNA, 600 bp, Canis familiaris
  misc_feature (61)..(61): n is a, c, g, or t
  misc_feature (64)..(64): n is a, c, g, or t
  misc_feature (83)..(83): n is a, c, g, or t
  misc_feature (98)..(98): n is a, c, g, or t
  misc_feature (116)..(116): n is a, c, g, or t
  misc_feature (120)..(120): n is a, c, g, or t
  misc_feature (127)..(127): n is a, c, g, or t
  misc_feature (151)..(151): n is a, c, g, or t
  misc_feature (165)..(165): n is a, c, g, or t
  misc_feature (174)..(174): n is a, c, g, or t
  misc_feature (179)..(179): n is a, c, g, or t
  misc_feature (183)..(183): n is a, c, g, or t
  misc_feature (189)..(189): n is a, c, g, or t
  misc_feature (218)..(218): n is a, c, g, or t
  misc_feature (235)..(235): n is a, c, g, or t
  misc_feature (247)..(247): n is a, c, g, or t
  misc_feature (308)..(308): n is a, c, g, or t
  misc_feature (314)..(314): n is a, c, g, or t
  misc_feature (320)..(320): n is a, c, g, or t
  misc_feature (324)..(324): n is a, c, g, or t
  misc_feature (330)..(330): n is a, c, g, or t
  misc_feature (344)..(344): n is a, c, g, or t
  misc_feature (359)..(359): n is a, c, g, or t
  misc_feature (383)..(384): n is a, c, g, or t
  misc_feature (388)..(388): n is a, c, g, or t
  misc_feature (397)..(397): n is a, c, g, or t
  misc_feature (406)..(407): n is a, c, g, or t
  misc_feature (425)..(425): n is a, c, g, or t
  misc_feature (437)..(438): n is a, c, g, or t
  misc_feature (441)..(441): n is a, c, g, or t
  misc_feature (453)..(457): n is a, c, g, or t
  misc_feature (462)..(462): n is a, c, g, or t
  misc_feature (464)..(464): n is a, c, g, or t
  misc_feature (466)..(466): n is a, c, g, or t
  misc_feature (472)..(472): n is a, c, g, or t
  misc_feature (496)..(496): n is a, c, g, or t
  misc_feature (512)..(512): n is a, c, g, or t
  misc_feature (521)..(521): n is a, c, g, or t
  misc_feature (528)..(529): n is a, c, g, or t
  misc_feature (537)..(537): n is a, c, g, or t
  misc_feature (541)..(541): n is a, c, g, or t
  misc_feature (545)..(546): n is a, c, g, or t
  misc_feature (548)..(548): n is a, c, g, or t
  misc_feature (550)..(550): n is a, c, g, or t
  misc_feature (552)..(553): n is a, c, g, or t
  misc_feature (568)..(568): n is a, c, g, or t
  misc_feature (579)..(579): n is a, c, g, or t
  misc_feature (582)..(582): n is a, c, g, or t
  misc_feature (588)..(588): n is a, c, g, or t
cttcagaatacatctttctctcattgtgattccaccataggagctgactttttttttttcnctnggtcttttaacacagtgtnactttttctctcagngggacattccttaaagcnaatncctttcngaggccagcgcatcatcccaggtnccgttcccagttcnggacttttncacanaagnggcctnccctcccccttcccggatgtaacgggttncccccccccggaggccntggagcccagtnccgaaagtggcaaagcaccacagccccggggccagggcagcagatacccagggggaggtgnaaaacnggggcnccgnggtttntttcccccccctgncaagtaaatttcctncctccagggaatcccacggggganntttnggggggaangggaaaaanncggcaaaatattaaaaancggggacttggnnaanccaaaaaggggnnnnnggaancntngggggncccccaaggggggtttaccggggnaattttttgggaaaanaagggggcnaaactcnntggggganaggntttnncncncnntaaaggggggggggnccccccaaggnccnccctcnggagggggaaaa

SEQ ID NO: 213447 - DNA, 524 bp, Canis familiaris; identical to SEQ ID NO: 3340
  misc_feature (8)..(8): n is a, c, g, or t
  misc_feature (15)..(15): n is a, c, g, or t
  misc_feature (375)..(375): n is a, c, g, or t
  misc_feature (397)..(397): n is a, c, g, or t
  misc_feature (459)..(459): n is a, c, g, or t
  misc_feature (464)..(464): n is a, c, g, or t
  misc_feature (473)..(473): n is a, c, g, or t
  misc_feature (491)..(491): n is a, c, g, or t
  misc_feature (498)..(498): n is a, c, g, or t
  misc_feature (501)..(501): n is a, c, g, or t
  misc_feature (522)..(522): n is a, c, g, or t

SEQ ID NO: 213448 - DNA, 489 bp, Canis familiaris; identical to SEQ ID NO: 3341
  misc_feature (28)..(28): n is a, c, g, or t
  misc_feature (30)..(31): n is a, c, g, or t
  misc_feature (37)..(37): n is a, c, g, or t
  misc_feature (39)..(39): n is a, c, g, or t
  misc_feature (42)..(42): n is a, c, g, or t
  misc_feature (67)..(67): n is a, c, g, or t
  misc_feature (91)..(91): n is a, c, g, or t
  misc_feature (95)..(95): n is a, c, g, or t
  misc_feature (128)..(129): n is a, c, g, or t
  misc_feature (154)..(154): n is a, c, g, or t
  misc_feature (159)..(159): n is a, c, g, or t
  misc_feature (180)..(180): n is a, c, g, or t
  misc_feature (194)..(194): n is a, c, g, or t
  misc_feature (210)..(210): n is a, c, g, or t
  misc_feature (257)..(257): n is a, c, g, or t
  misc_feature (283)..(284): n is a, c, g, or t
  misc_feature (317)..(317): n is a, c, g, or t
  misc_feature (328)..(328): n is a, c, g, or t
  misc_feature (351)..(351): n is a, c, g, or t
  misc_feature (388)..(388): n is a, c, g, or t
  misc_feature (390)..(391): n is a, c, g, or t
  misc_feature (470)..(470): n is a, c, g, or t
  misc_feature (477)..(477): n is a, c, g, or t
  misc_feature (479)..(479): n is a, c, g, or t

SEQ ID NO: 213449 - DNA, 600 bp, Canis familiaris
  misc_feature (11)..(11): n is a, c, g, or t
  misc_feature (15)..(15): n is a, c, g, or t
  misc_feature (17)..(18): n is a, c, g, or t
  misc_feature (25)..(25): n is a, c, g, or t
  misc_feature (28)..(28): n is a, c, g, or t
  misc_feature (38)..(38): n is a, c, g, or t
  misc_feature (43)..(43): n is a, c, g, or t
  misc_feature (51)..(52): n is a, c, g, or t
  misc_feature (57)..(58): n is a, c, g, or t
  misc_feature (69)..(71): n is a, c, g, or t
  misc_feature (76)..(76): n is a, c, g, or t
  misc_feature (84)..(84): n is a, c, g, or t
  misc_feature (89)..(89): n is a, c, g, or t
  misc_feature (94)..(94): n is a, c, g, or t
  misc_feature (104)..(104): n is a, c, g, or t
  misc_feature (186)..(186): n is a, c, g, or t
  misc_feature (389)..(389): n is a, c, g, or t
  misc_feature (445)..(445): n is a, c, g, or t
  misc_feature (471)..(471): n is a, c, g, or t
  misc_feature (492)..(492): n is a, c, g, or t
  misc_feature (551)..(551): n is a, c, g, or t
  misc_feature (556)..(556): n is a, c, g, or t
  misc_feature (558)..(558): n is a, c, g, or t
  misc_feature (572)..(572): n is a, c, g, or t
  misc_feature (594)..(594): n is a, c, g, or t
catggttcagntacnannccagagnaancaaaaatacnaggtnggacattnngattnnatgccccaccnnngtgcntctgtccnacccngatantctagtgaantctctttcttgctaagccagcgggggtgagtttctactcctcacagctaaaacagccttcacggggatagtgacataaaatnatctctcagtgcatatggataaatgtgtttgcattcatcaaagtgatattcagtgggtctgtggtcaaataagtgttctcaccccttttgcacttgtcacttcatttggaatcacttggagctgggttcactctgcagtgtgaattcggggcttttgtgtgtggcttttccatatgataatgtcgagtatattttcagcccancctcaatccaaaggggcatcaccttaaggagatataattatagcagccatttggcngkycycttaacttaaaggacmaagcncaaaccagtgtggcyaagranattacamcytsgggrakgacaacccagggaccaasgcaggcmargaggggtcmgccmgnagagngncactgtacaacccntctgtagcactttatcctcagnggggag

SEQ ID NO: 213450 - DNA, 325 bp, Canis familiaris; identical to SEQ ID NO: 3343
  misc_feature (1)..(1): n is a, c, g, or t
  misc_feature (61)..(61): n is a, c, g, or t
  misc_feature (80)..(80): n is a, c, g, or t
  misc_feature (87)..(87): n is a, c, g, or t
  misc_feature (111)..(111): n is a, c, g, or t
  misc_feature (240)..(240): n is a, c, g, or t
  misc_feature (281)..(281): n is a, c, g, or t
  misc_feature (286)..(286): n is a, c, g, or t
  misc_feature (288)..(288): n is a, c, g, or t
  misc_feature (300)..(301): n is a, c, g, or t
  misc_feature (314)..(314): n is a, c, g, or t
  misc_feature (316)..(316): n is a, c, g, or t
  misc_feature (318)..(318): n is a, c, g, or t

SEQ ID NO: 213451 - DNA, 600 bp, Canis familiaris
  misc_feature (209)..(209): n is a, c, g, or t
  misc_feature (218)..(218): n is a, c, g, or t
  misc_feature (221)..(221): n is a, c, g, or t
  misc_feature (237)..(238): n is a, c, g, or t
  misc_feature (246)..(246): n is a, c, g, or t
  misc_feature (253)..(253): n is a, c, g, or t
  misc_feature (256)..(256): n is a, c, g, or t
  misc_feature (259)..(260): n is a, c, g, or t
  misc_feature (263)..(264): n is a, c, g, or t
  misc_feature (269)..(270): n is a, c, g, or t
  misc_feature (274)..(274): n is a, c, g, or t
  misc_feature (280)..(280): n is a, c, g, or t
  misc_feature (282)..(282): n is a, c, g, or t
  misc_feature (287)..(287): n is a, c, g, or t
  misc_feature (292)..(292): n is a, c, g, or t
  misc_feature (295)..(295): n is a, c, g, or t
  misc_feature (316)..(316): n is a, c, g, or t
  misc_feature (321)..(321): n is a, c, g, or t
  misc_feature (328)..(328): n is a, c, g, or t
  misc_feature (333)..(333): n is a, c, g, or t
  misc_feature (340)..(340): n is a, c, g, or t
  misc_feature (343)..(343): n is a, c, g, or t
  misc_feature (352)..(352): n is a, c, g, or t
  misc_feature (358)..(358): n is a, c, g, or t
  misc_feature (361)..(361): n is a, c, g, or t
  misc_feature (367)..(368): n is a, c, g, or t
  misc_feature (371)..(371): n is a, c, g, or t
  misc_feature (385)..(385): n is a, c, g, or t
  misc_feature (389)..(389): n is a, c, g, or t
  misc_feature (406)..(407): n is a, c, g, or t
  misc_feature (409)..(409): n is a, c, g, or t
  misc_feature (413)..(413): n is a, c, g, or t
  misc_feature (423)..(423): n is a, c, g, or t
  misc_feature (426)..(426): n is a, c, g, or t
  misc_feature (435)..(435): n is a, c, g, or t
  misc_feature (442)..(442): n is a, c, g, or t
  misc_feature (446)..(447): n is a, c, g, or t
  misc_feature (454)..(454): n is a, c, g, or t
  misc_feature (457)..(461): n is a, c, g, or t
  misc_feature (478)..(478): n is a, c, g, or t
  misc_feature (521)..(521): n is a, c, g, or t
atacccagggcaactaagcgcagagagcatgtagccaggaaatagcattacagggcccctagtggggaaaccaagactggctattccagaaaccccaataccatccagactgggaccttggaatgtaaaagtccgagatcggatgttaaggatttwggaaaatcmctttaggcttgtccakttacccaaargrgwggmytggsggaatnttctaatantgnccccctttctccgcannttgggggnatatttnttnggnnccnnagganngggnaccggngntgttngatanganctgacataagagcagtgtgancaganccatatnggggngacccantangtatccttnaggatntanatcttnntgntgaagatgagcatnttcnatgatgatacaaggatnngnggtntagagaccanagngagacaatngcattcncttnnaataganggnnnnngagagaggaggagtagnagcaaagccagatgcatcacaggagccatgaacagggtgcatntcaagcatgagggaggagacgatgatgctgcatgctgtcgagagttctagagcgtcggtttacaggcggccatcggatc

SEQ ID NO: 213452 - DNA, 453 bp, Canis familiaris; identical to SEQ ID NO: 3345
  misc_feature (2)..(4): n is a, c, g, or t
  misc_feature (6)..(7): n is a, c, g, or t
  misc_feature (10)..(11): n is a, c, g, or t
  misc_feature (18)..(18): n is a, c, g, or t
  misc_feature (21)..(21): n is a, c, g, or t
  misc_feature (29)..(29): n is a, c, g, or t
  misc_feature (41)..(41): n is a, c, g, or t
  misc_feature (45)..(45): n is a, c, g, or t
  misc_feature (48)..(48): n is a, c, g, or t
  misc_feature (411)..(411): n is a, c, g, or t
  misc_feature (441)..(441): n is a, c, g, or t

SEQ ID NO: 213453 - DNA, 310 bp, Canis familiaris; identical to SEQ ID NO: 3346
  misc_feature (51)..(51): n is a, c, g, or t
  misc_feature (86)..(86): n is a, c, g, or t
  misc_feature (91)..(91): n is a, c, g, or t
  misc_feature (306)..(306): n is a, c, g, or t

SEQ ID NO: 213454 - DNA, 600 bp, Canis familiaris
  misc_feature (12)..(15): n is a, c, g, or t
  misc_feature (47)..(47): n is a, c, g, or t
  misc_feature (180)..(180): n is a, c, g, or t
  misc_feature (182)..(182): n is a, c, g, or t
  misc_feature (244)..(244): n is a, c, g, or t
  misc_feature (249)..(249): n is a, c, g, or t
  misc_feature (255)..(255): n is a, c, g, or t
  misc_feature (263)..(263): n is a, c, g, or t
  misc_feature (270)..(270): n is a, c, g, or t
  misc_feature (313)..(313): n is a, c, g, or t
  misc_feature (320)..(320): n is a, c, g, or t
  misc_feature (349)..(349): n is a, c, g, or t
  misc_feature (352)..(352): n is a, c, g, or t
  misc_feature (374)..(374): n is a, c, g, or t
  misc_feature (376)..(376): n is a, c, g, or t
  misc_feature (380)..(380): n is a, c, g, or t
  misc_feature (389)..(389): n is a, c, g, or t
  misc_feature (391)..(391): n is a, c, g, or t
  misc_feature (398)..(398): n is a, c, g, or t
  misc_feature (402)..(402): n is a, c, g, or t
  misc_feature (422)..(422): n is a, c, g, or t
  misc_feature (436)..(436): n is a, c, g, or t
  misc_feature (440)..(440): n is a, c, g, or t
  misc_feature (453)..(454): n is a, c, g, or t
  misc_feature (469)..(469): n is a, c, g, or t
  misc_feature (472)..(472): n is a, c, g, or t
  misc_feature (483)..(483): n is a, c, g, or t
  misc_feature (488)..(488): n is a, c, g, or t
  misc_feature (505)..(506): n is a, c, g, or t
  misc_feature (523)..(523): n is a, c, g, or t
  misc_feature (538)..(538): n is a, c, g, or t
  misc_feature (543)..(543): n is a, c, g, or t
  misc_feature (570)..(571): n is a, c, g, or t
  misc_feature (576)..(576): n is a, c, g, or t
  misc_feature (579)..(579): n is a, c, g, or t
  misc_feature (583)..(583): n is a, c, g, or t
  misc_feature (586)..(587): n is a, c, g, or t
  misc_feature (591)..(591): n is a, c, g, or t
  misc_feature (599)..(599): n is a, c, g, or t
catgtgccatannnnaattacatcttcatataagcccatcaactgtntgtggttttctttgccttatgaagttgtaatttttaaagatttattatttttttttatttggagacagggagagcacatgagtgggaagggccagagagggagagagactctcaagcagactcccacactggngncacagagcccaaggacggggtttcattccacacaattcgtgagatccacaaagtggagcttncaacnaaaagntggggcgncacaacnaaatgttcccacaacaggtgcccccaaaggtgtgttttaaaanagaccgnaaaggagttacaaacaacacactttgtancgnctttaaagtagccaaggggttnancttnaccagttcncnggacccnttgnggggattccagttaccacgngtttccttcccttncaancggagggcccccnncagaagttggggggncantcccccagggnggaanccccccagttccccggnncggggaaagtctagttncccccccgttggggnggganatttggccaaaaaagaaaccccgggtnnaaagnttncccnccnngaancgggaggnt

SEQ ID NO: 213455 - DNA, 600 bp, Canis familiaris
  misc_feature (13)..(13): n is a, c, g, or t
  misc_feature (32)..(32): n is a, c, g, or t
  misc_feature (39)..(39): n is a, c, g, or t
  misc_feature (49)..(49): n is a, c, g, or t
  misc_feature (88)..(88): n is a, c, g, or t
  misc_feature (98)..(98): n is a, c, g, or t
  misc_feature (100)..(103): n is a, c, g, or t
  misc_feature (138)..(138): n is a, c, g, or t
  misc_feature (324)..(324): n is a, c, g, or t
  misc_feature (351)..(351): n is a, c, g, or t
  misc_feature (353)..(353): n is a, c, g, or t
  misc_feature (415)..(415): n is a, c, g, or t
  misc_feature (559)..(560): n is a, c, g, or t
  misc_feature (570)..(570): n is a, c, g, or t
actcaagtttttncccaaacgaccaatccaantgttccntgtggattancccccgggatgaaaatggtttccggctccgtgttccccnaacacttttnannnnatgatattggtttctgcttctgtgttctctacacnttttatatttaaaaatctatcaataatttgcttagaaaataaaagaaaaggggaaaatgtggtagcaaagagaatatggatgatgtctacatagttgctctgtcttgctttctgaggttcaatatttcactgaatctttgggctgggctagatagaagccctagatggaagaagattctctggccntctgtggcagaagatatgtctgctatntngtaggggttttgtttgtttgtttttgtttcattcagaacaacactgacatgcatccactcanataagtcatatttatcttgaccaactcatttagttgcaataaaatttttatgctttcatgtattgggtcacacacacacacacacacacacacacacacactattcttgtgttttccagaccacaagtgttgagaagtgtaaannaccccacatntggcagtttgaaagaaggcccgtcccagtc

SEQ ID NO: 213456 - DNA, 518 bp, Canis familiaris; identical to SEQ ID NO: 3349
  misc_feature (193)..(193): n is a, c, g, or t
  misc_feature (197)..(197): n is a, c, g, or t
  misc_feature (216)..(216): n is a, c, g, or t
  misc_feature (222)..(222): n is a, c, g, or t
  misc_feature (226)..(226): n is a, c, g, or t
  misc_feature (237)..(237): n is a, c, g, or t
  misc_feature (243)..(243): n is a, c, g, or t
  misc_feature (266)..(266): n is a, c, g, or t
  misc_feature (285)..(286): n is a, c, g, or t
  misc_feature (291)..(292): n is a, c, g, or t
  misc_feature (298)..(298): n is a, c, g, or t
  misc_feature (301)..(301): n is a, c, g, or t
  misc_feature (311)..(311): n is a, c, g, or t
  misc_feature (323)..(323): n is a, c, g, or t
  misc_feature (335)..(335): n is a, c, g, or t
  misc_feature (337)..(337): n is a, c, g, or t
  misc_feature (345)..(345): n is a, c, g, or t
  misc_feature (349)..(349): n is a, c, g, or t
  misc_feature (355)..(355): n is a, c, g, or t
  misc_feature (370)..(370): n is a, c, g, or t
  misc_feature (385)..(385): n is a, c, g, or t
  misc_feature (391)..(391): n is a, c, g, or t
  misc_feature (395)..(395): n is a, c, g, or t
  misc_feature (402)..(402): n is a, c, g, or t
  misc_feature (407)..(407): n is a, c, g, or t
  misc_feature (409)..(411): n is a, c, g, or t
  misc_feature (414)..(414): n is a, c, g, or t
  misc_feature (416)..(416): n is a, c, g, or t
  misc_feature (424)..(424): n is a, c, g, or t
  misc_feature (438)..(439): n is a, c, g, or t
  misc_feature (442)..(443): n is a, c, g, or t
  misc_feature (450)..(450): n is a, c, g, or t
  misc_feature (455)..(455): n is a, c, g, or t
  misc_feature (461)..(461): n is a, c, g, or t
  misc_feature (474)..(474): n is a, c, g, or t
  misc_feature (480)..(480): n is a, c, g, or t
  misc_feature (487)..(487): n is a, c, g, or t
  misc_feature (492)..(492): n is a, c, g, or t
  misc_feature (501)..(501): n is a, c, g, or t
  misc_feature (509)..(509): n is a, c, g, or t
  misc_feature (511)..(511): n is a, c, g, or t
  misc_feature (513)..(513): n is a, c, g, or t
  misc_feature (517)..(517): n is a, c, g, or t

SEQ ID NO: 213457 - DNA, 175 bp, Canis familiaris; identical to SEQ ID NO: 3350

SEQ ID NO: 213458 - DNA, 600 bp, Canis familiaris
ccattagacactgggactctttgtcatgcaagttgatggtatacattttctatacatagaggattgatcacattaggagaatttgggagaaattactttatattgagtcactagttgcatagtattgtttgtaattctgtgaaagggaaaagaatgtgaagaaagctgtatgccatcaatgataatcacacatgcttttgtattgaaagggtatgtatatatcattgtgattttggaaaggtttttcatgattttaacatggtaatacatcactcagaagatgtctcaggagaaggtttgtgtttgtgtaaaagctatctgttatcctcccacaccatgccatccaaatagattgaggttaaaagaatcagatacactaatcacacactgagaaggaagcatatccaggcacaatgtatcaacctttggtgatactttgataaaactgcttttctatgcatttttaatacttctacaatgaccccatgccttaatttcagttaagtgcctaagattctataattgtaattaatgtaatttttagttaaaagcactattactttttgacaaaccagcattttattttaccaaaagatctag

SEQ ID NO: 213459 - DNA, 422 bp, Canis familiaris; identical to SEQ ID NO: 3352
  misc_feature (8)..(8): n is a, c, g, or t
  misc_feature (53)..(53): n is a, c, g, or t
  misc_feature (66)..(66): n is a, c, g, or t
  misc_feature (299)..(299): n is a, c, g, or t
  misc_feature (307)..(307): n is a, c, g, or t
  misc_feature (318)..(318): n is a, c, g, or t
  misc_feature (323)..(323): n is a, c, g, or t
  misc_feature (327)..(327): n is a, c, g, or t
  misc_feature (336)..(336): n is a, c, g, or t
  misc_feature (353)..(353): n is a, c, g, or t
  misc_feature (358)..(358): n is a, c, g, or t
  misc_feature (368)..(368): n is a, c, g, or t
  misc_feature (373)..(373): n is a, c, g, or t
  misc_feature (383)..(383): n is a, c, g, or t
  misc_feature (387)..(387): n is a, c, g, or t
  misc_feature (400)..(400): n is a, c, g, or t
  misc_feature (420)..(420): n is a, c, g, or t

SEQ ID NO: 213460 - DNA, 430 bp, Canis familiaris; identical to SEQ ID NO: 3353
  misc_feature (15)..(15): n is a, c, g, or t
  misc_feature (19)..(19): n is a, c, g, or t
  misc_feature (52)..(52): n is a, c, g, or t
  misc_feature (123)..(123): n is a, c, g, or t
  misc_feature (166)..(166): n is a, c, g, or t
  misc_feature (168)..(168): n is a, c, g, or t
  misc_feature (170)..(170): n is a, c, g, or t
  misc_feature (239)..(239): n is a, c, g, or t
  misc_feature (243)..(243): n is a, c, g, or t
  misc_feature (248)..(248): n is a, c, g, or t
  misc_feature (255)..(255): n is a, c, g, or t
  misc_feature (323)..(323): n is a, c, g, or t
  misc_feature (334)..(334): n is a, c, g, or t
  misc_feature (364)..(364): n is a, c, g, or t
  misc_feature (366)..(366): n is a, c, g, or t
  misc_feature (395)..(395): n is a, c, g, or t
  misc_feature (403)..(403): n is a, c, g, or t
  misc_feature (411)..(411): n is a, c, g, or t

SEQ ID NO: 213461 - DNA, 245 bp, Canis familiaris; identical to SEQ ID NO: 3354
  misc_feature (178)..(178): n is a, c, g, or t
  misc_feature (189)..(189): n is a, c, g, or t
  misc_feature (235)..(235): n is a, c, g, or t

SEQ ID NO: 213462 - DNA, 222 bp, Canis familiaris; identical to SEQ ID NO: 3355
  misc_feature (170)..(170): n is a, c, g, or t
  misc_feature (183)..(183): n is a, c, g, or t
  misc_feature (191)..(191): n is a, c, g, or t
  misc_feature (204)..(204): n is a, c, g, or t
  misc_feature (212)..(212): n is a, c, g, or t
  misc_feature (214)..(214): n is a, c, g, or t
  misc_feature (217)..(217): n is a, c, g, or t

SEQ ID NO: 213463 - DNA, 253 bp, Canis familiaris; identical to SEQ ID NO: 3356
  misc_feature (196)..(197): n is a, c, g, or t
  misc_feature (199)..(199): n is a, c, g, or t
  misc_feature (207)..(207): n is a, c, g, or t
  misc_feature (225)..(225): n is a, c, g, or t
  misc_feature (232)..(232): n is a, c, g, or t
  misc_feature (245)..(245): n is a, c, g, or t
  misc_feature (247)..(247): n is a, c, g, or t

SEQ ID NO: 213464 - DNA, 270 bp, Canis familiaris; identical to SEQ ID NO: 3357
  misc_feature (171)..(171): n is a, c, g, or t
  misc_feature (176)..(177): n is a, c, g, or t
  misc_feature (186)..(186): n is a, c, g, or t
  misc_feature (188)..(188): n is a, c, g, or t
  misc_feature (191)..(191): n is a, c, g, or t
  misc_feature (200)..(200): n is a, c, g, or t
  misc_feature (222)..(223): n is a, c, g, or t
  misc_feature (237)..(237): n is a, c, g, or t
  misc_feature (247)..(247): n is a, c, g, or t
  misc_feature (251)..(251): n is a, c, g, or t
  misc_feature (254)..(255): n is a, c, g, or t

SEQ ID NO: 213465 - DNA, 251 bp, Canis familiaris; identical to SEQ ID NO: 3358
  misc_feature (250)..(250): n is a, c, g, or t

SEQ ID NO: 213466 - DNA, 218 bp, Canis familiaris; identical to SEQ ID NO: 3359
  misc_feature (14)..(14): n is a, c, g, or t
  misc_feature (49)..(49): n is a, c, g, or t

SEQ ID NO: 213467 - DNA, 319 bp, Canis familiaris; identical to SEQ ID NO: 3360
  misc_feature (274)..(274): n is a, c, g, or t

SEQ ID NO: 213468 - DNA, 305 bp, Canis familiaris; identical to SEQ ID NO: 3361
  misc_feature (257)..(257): n is a, c, g, or t
  misc_feature (272)..(272): n is a, c, g, or t
  misc_feature (275)..(275): n is a, c, g, or t
  misc_feature (289)..(289): n is a, c, g, or t

SEQ ID NO: 213469 - DNA, 223 bp, Canis familiaris; identical to SEQ ID NO: 3362
  misc_feature (193)..(193): n is a, c, g, or t
  misc_feature (195)..(195): n is a, c, g, or t

SEQ ID NO: 213470 - DNA, 443 bp, Canis familiaris; identical to SEQ ID NO: 3363
  misc_feature (3)..(3): n is a, c, g, or t
  misc_feature (11)..(11): n is a, c, g, or t
  misc_feature (18)..(19): n is a, c, g, or t
  misc_feature (22)..(22): n is a, c, g, or t
  misc_feature (34)..(35): n is a, c, g, or t
  misc_feature (42)..(42): n is a, c, g, or t
  misc_feature (46)..(46): n is a, c, g, or t
  misc_feature (52)..(52): n is a, c, g, or t
  misc_feature (57)..(57): n is a, c, g, or t
  misc_feature (64)..(64): n is a, c, g, or t
  misc_feature (79)..(79): n is a, c, g, or t
  misc_feature (96)..(96): n is a, c, g, or t
  misc_feature (146)..(146): n is a, c, g, or t
  misc_feature (156)..(156): n is a, c, g, or t
  misc_feature (164)..(164): n is a, c, g, or t
  misc_feature (171)..(171): n is a, c, g, or t
  misc_feature (189)..(189): n is a, c, g, or t
  misc_feature (199)..(199): n is a, c, g, or t
  misc_feature (283)..(284): n is a, c, g, or t
  misc_feature (291)..(291): n is a, c, g, or t
  misc_feature (303)..(303): n is a, c, g, or t
  misc_feature (314)..(314): n is a, c, g, or t
  misc_feature (360)..(361): n is a, c, g, or t
  misc_feature (412)..(412): n is a, c, g, or t

SEQ ID NO: 213471 - DNA, 405 bp, Canis familiaris; identical to SEQ ID NO: 3364
  misc_feature (39)..(39): n is a, c, g, or t
  misc_feature (49)..(49): n is a, c, g, or t
  misc_feature (54)..(54): n is a, c, g, or t
  misc_feature (99)..(99): n is a, c, g, or t
  misc_feature (101)..(101): n is a, c, g, or t
  misc_feature (125)..(125): n is a, c, g, or t
  misc_feature (174)..(174): n is a, c, g, or t
  misc_feature (188)..(188): n is a, c, g, or t
  misc_feature (280)..(280): n is a, c, g, or t
  misc_feature (293)..(293): n is a, c, g, or t
  misc_feature (320)..(320): n is a, c, g, or t
  misc_feature (332)..(332): n is a, c, g, or t
  misc_feature (344)..(344): n is a, c, g, or t

SEQ ID NO: 213472 - DNA, 280 bp, Canis familiaris; identical to SEQ ID NO: 3365
  misc_feature (259)..(259): n is a, c, g, or t
  misc_feature (268)..(268): n is a, c, g, or t
  misc_feature (277)..(277): n is a, c, g, or t

SEQ ID NO: 213473 - DNA, 511 bp, Canis familiaris; identical to SEQ ID NO: 3366
  misc_feature (168)..(168): n is a, c, g, or t
  misc_feature (170)..(170): n is a, c, g, or t
  misc_feature (176)..(176): n is a, c, g, or t
  misc_feature (250)..(250): n is a, c, g, or t
  misc_feature (341)..(341): n is a, c, g, or t
  misc_feature (360)..(360): n is a, c, g, or t
  misc_feature (426)..(426): n is a, c, g, or t
  misc_feature (430)..(430): n is a, c, g, or t
  misc_feature (439)..(439): n is a, c, g, or t
  misc_feature (458)..(458): n is a, c, g, or t
  misc_feature (469)..(469): n is a, c, g, or t
  misc_feature (479)..(479): n is a, c, g, or t
  misc_feature (484)..(484): n is a, c, g, or t
  misc_feature (494)..(494): n is a, c, g, or t

SEQ ID NO: 213474 - DNA, 479 bp, Canis familiaris; identical to SEQ ID NO: 3367
  misc_feature (50)..(50): n is a, c, g, or t
  misc_feature (52)..(52): n is a, c, g, or t
  misc_feature (187)..(187): n is a, c, g, or t
  misc_feature (189)..(189): n is a, c, g, or t
  misc_feature (354)..(354): n is a, c, g, or t
  misc_feature (357)..(357): n is a, c, g, or t
  misc_feature (359)..(359): n is a, c, g, or t
  misc_feature (383)..(383): n is a, c, g, or t
  misc_feature (389)..(389): n is a, c, g, or t
  misc_feature (435)..(435): n is a, c, g, or t

SEQ ID NO: 213475 - DNA, 562 bp, Canis familiaris; identical to SEQ ID NO: 3368
  misc_feature (246)..(246): n is a, c, g, or t
  misc_feature (308)..(308): n is a, c, g, or t
  misc_feature (349)..(349): n is a, c, g, or t
  misc_feature (433)..(433): n is a, c, g, or t
  misc_feature (445)..(445): n is a, c, g, or t
  misc_feature (461)..(461): n is a, c, g, or t
  misc_feature (477)..(477): n is a, c, g, or t
  misc_feature (489)..(490): n is a, c, g, or t
  misc_feature (518)..(518): n is a, c, g, or t
  misc_feature (521)..(521): n is a, c, g, or t
  misc_feature (524)..(524): n is a, c, g, or t

SEQ ID NO: 213476 - DNA, 415 bp, Canis familiaris; identical to SEQ ID NO: 3369
  misc_feature (25)..(25): n is a, c, g, or t
  misc_feature (27)..(27): n is a, c, g, or t
  misc_feature (107)..(107): n is a, c, g, or t
  misc_feature (190)..(190): n is a, c, g, or t
  misc_feature (224)..(224): n is a, c, g, or t
  misc_feature (274)..(274): n is a, c, g, or t
  misc_feature (307)..(307): n is a, c, g, or t
  misc_feature (310)..(310): n is a, c, g, or t
  misc_feature (318)..(318): n is a, c, g, or t
  misc_feature (330)..(330): n is a, c, g, or t
  misc_feature (334)..(336): n is a, c, g, or t
  misc_feature (351)..(351): n is a, c, g, or t
  misc_feature (391)..(391): n is a, c, g, or t
  misc_feature (393)..(393): n is a, c, g, or t

SEQ ID NO: 213477 - DNA, 409 bp, Canis familiaris; identical to SEQ ID NO: 3370
  misc_feature (41)..(41): n is a, c, g, or t
  misc_feature (223)..(223): n is a, c, g, or t
  misc_feature (235)..(235): n is a, c, g, or t
  misc_feature (242)..(242): n is a, c, g, or t
  misc_feature (264)..(264): n is a, c, g, or t
  misc_feature (345)..(345): n is a, c, g, or t
  misc_feature (378)..(378): n is a, c, g, or t
  misc_feature (386)..(386): n is a, c, g, or t
  misc_feature (394)..(394): n is a, c, g, or t

SEQ ID NO: 213478 - DNA, 538 bp, Canis familiaris; identical to SEQ ID NO: 3371
  misc_feature (14)..(14): n is a, c, g, or t
  misc_feature (68)..(68): n is a, c, g, or t
  misc_feature (326)..(327): n is a, c, g, or t
  misc_feature (450)..(450): n is a, c, g, or t

SEQ ID NO: 213479 - DNA, 266 bp, Canis familiaris; identical to SEQ ID NO: 3372
  misc_feature (45)..(45): n is a, c, g, or t
  misc_feature (79)..(79): n is a, c, g, or t
  misc_feature (106)..(106): n is a, c, g, or t
  misc_feature (124)..(124): n is a, c, g, or t
  misc_feature (136)..(136): n is a, c, g, or t
  misc_feature (138)..(138): n is a, c, g, or t
  misc_feature (146)..(146): n is a, c, g, or t
  misc_feature (180)..(180): n is a, c, g, or t
  misc_feature (209)..(209): n is a, c, g, or t
  misc_feature (249)..(249): n is a, c, g, or t

SEQ ID NO: 213480 - DNA, 353 bp, Canis familiaris; identical to SEQ ID NO: 3373
  misc_feature (22)..(22): n is a, c, g, or t
  misc_feature (41)..(41): n is a, c, g, or t
  misc_feature (48)..(48): n is a, c, g, or t
  misc_feature (68)..(68): n is a, c, g, or t
  misc_feature (72)..(72): n is a, c, g, or t
  misc_feature (80)..(80): n is a, c, g, or t
  misc_feature (120)..(120): n is a, c, g, or t
  misc_feature (164)..(164): n is a, c, g, or t
  misc_feature (180)..(180): n is a, c, g, or t
  misc_feature (199)..(199): n is a, c, g, or t
  misc_feature (201)..(201): n is a, c, g, or t
  misc_feature (207)..(207): n is a, c, g, or t
  misc_feature (215)..(215): n is a, c, g, or t
  misc_feature (225)..(225): n is a, c, g, or t
  misc_feature (234)..(234): n is a, c, g, or t
  misc_feature (246)..(246): n is a, c, g, or t
  misc_feature (248)..(248): n is a, c, g, or t
  misc_feature (251)..(251): n is a, c, g, or t
  misc_feature (263)..(263): n is a, c, g, or t
  misc_feature (283)..(283): n is a, c, g, or t

SEQ ID NO: 213481 - DNA, 268 bp, Canis familiaris; identical to SEQ ID NO: 3374
  misc_feature (33)..(33): n is a, c, g, or t
  misc_feature (51)..(51): n is a, c, g, or t
  misc_feature (99)..(99): n is a, c, g, or t
  misc_feature (121)..(122): n is a, c, g, or t
  misc_feature (137)..(137): n is a, c, g, or t
  misc_feature (140)..(140): n is a, c, g, or t
  misc_feature (145)..(145): n is a, c, g, or t
  misc_feature (202)..(202): n is a, c, g, or t
  misc_feature (207)..(207): n is a, c, g, or t
  misc_feature (215)..(215): n is a, c, g, or t
  misc_feature (221)..(221): n is a, c, g, or t
  misc_feature (224)..(224): n is a, c, g, or t
  misc_feature (232)..(232): n is a, c, g, or t
  misc_feature (238)..(238): n is a, c, g, or t
  misc_feature (245)..(245): n is a, c, g, or t
  misc_feature (252)..(252): n is a, c, g, or t

SEQ ID NO: 213482 - DNA, 456 bp, Canis familiaris; identical to SEQ ID NO: 3375
  misc_feature (202)..(202): n is a, c, g, or t
  misc_feature (282)..(282): n is a, c, g, or t
  misc_feature (284)..(284): n is a, c, g, or t
  misc_feature (300)..(300): n is a, c, g, or t
  misc_feature (305)..(305): n is a, c, g, or t
  misc_feature (352)..(353): n is a, c, g, or t
  misc_feature (360)..(360): n is a, c, g, or t
  misc_feature (383)..(383): n is a, c, g, or t
  misc_feature (394)..(394): n is a, c, g, or t
  misc_feature (423)..(423): n is a, c, g, or t
  misc_feature (430)..(430): n is a, c, g, or t
  misc_feature (433)..(433): n is a, c, g, or t
  misc_feature (446)..(446): n is a, c, g, or t

SEQ ID NO: 213483 - DNA, 303 bp, Canis familiaris; identical to SEQ ID NO: 3376
  misc_feature (14)..(14): n is a, c, g, or t
  misc_feature (50)..(50): n is a, c, g, or t
  misc_feature (53)..(53): n is a, c, g, or t
  misc_feature (103)..(103): n is a, c, g, or t
  misc_feature (110)..(110): n is a, c, g, or t
  misc_feature (112)..(112): n is a, c, g, or t
  misc_feature (120)..(120): n is a, c, g, or t
  misc_feature (124)..(124): n is a, c, g, or t
  misc_feature (153)..(153): n is a, c, g, or t
  misc_feature (172)..(172): n is a, c, g, or t
  misc_feature (210)..(210): n is a, c, g, or t
  misc_feature (225)..(225): n is a, c, g, or t
  misc_feature (251)..(251): n is a, c, g, or t
  misc_feature (283)..(283): n is a, c, g, or t

SEQ ID NO: 213484 - DNA, 390 bp, Canis familiaris; identical to SEQ ID NO: 3377
  misc_feature (194)..(194): n is a, c, g, or t
  misc_feature (233)..(233): n is a, c, g, or t
  misc_feature (235)..(235): n is a, c, g, or t
  misc_feature (243)..(243): n is a, c, g, or t
  misc_feature (303)..(303): n is a, c, g, or t
  misc_feature (333)..(333): n is a, c, g, or t
  misc_feature (358)..(358): n is a, c, g, or t
  misc_feature (366)..(366): n is a, c, g, or t

SEQ ID NO: 213485 - DNA, 465 bp, Canis familiaris; identical to SEQ ID NO: 3378
  misc_feature (72)..(72): n is a, c, g, or t
  misc_feature (91)..(91): n is a, c, g, or t
  misc_feature (114)..(114): n is a, c, g, or t
  misc_feature (141)..(141): n is a, c, g, or t
  misc_feature (154)..(154): n is a, c, g, or t
  misc_feature (165)..(165): n is a, c, g, or t
  misc_feature (181)..(181): n is a, c, g, or t
  misc_feature (279)..(279): n is a, c, g, or t
  misc_feature (281)..(281): n is a, c, g, or t
  misc_feature (308)..(308): n is a, c, g, or t
  misc_feature (328)..(328): n is a, c, g, or t
  misc_feature (390)..(390): n is a, c, g, or t
  misc_feature (399)..(399): n is a, c, g, or t
  misc_feature (403)..(403): n is a, c, g, or t
  misc_feature (415)..(415): n is a, c, g, or t
  misc_feature (426)..(426): n is a, c, g, or t
  misc_feature (436)..(436): n is a, c, g, or t

SEQ ID NO: 213486 - DNA, 309 bp, Canis familiaris; identical to SEQ ID NO: 3379
  misc_feature (68)..(68): n is a, c, g, or t
  misc_feature (74)..(74): n is a, c, g, or t
  misc_feature (94)..(94): n is a, c, g, or t
  misc_feature (164)..(164): n is a, c, g, or t
  misc_feature (235)..(236): n is a, c, g, or t
  misc_feature (302)..(302): n is a, c, g, or t

SEQ ID NO: 213487 - DNA, 455 bp, Canis familiaris; identical to SEQ ID NO: 3380
  misc_feature (129)..(129): n is a, c, g, or t
  misc_feature (218)..(218): n is a, c, g, or t
  misc_feature (220)..(220): n is a, c, g, or t
  misc_feature (237)..(237): n is a, c, g, or t
  misc_feature (243)..(243): n is a, c, g, or t
  misc_feature (266)..(266): n is a, c, g, or t
  misc_feature (272)..(272): n is a, c, g, or t
  misc_feature (276)..(276): n is a, c, g, or t
  misc_feature (278)..(278): n is a, c, g, or t
  misc_feature (291)..(291): n is a, c, g, or t
  misc_feature (301)..(301): n is a, c, g, or t
  misc_feature (354)..(354): n is a, c, g, or t
  misc_feature (381)..(381): n is a, c, g, or t
  misc_feature (395)..(395): n is a, c, g, or t
  misc_feature (403)..(403): n is a, c, g, or t

SEQ ID NO: 213488 - DNA, 300 bp, Canis familiaris; identical to SEQ ID NO: 3381
  misc_feature (84)..(84): n is a, c, g, or t
  misc_feature (148)..(148): n is a, c, g, or t
  misc_feature (152)..(152): n is a, c, g, or t
  misc_feature (155)..(155): n is a, c, g, or t
  misc_feature (162)..(162): n is a, c, g, or t
  misc_feature (182)..(182): n is a, c, g, or t

SEQ ID NO: 213489 - DNA, 477 bp, Canis familiaris; identical to SEQ ID NO: 3382
  misc_feature (26)..(26): n is a, c, g, or t
  misc_feature (30)..(30): n is a, c, g, or t
  misc_feature (38)..(38): n is a, c, g, or t
  misc_feature (79)..(79): n is a, c, g, or t
  misc_feature (109)..(109): n is a, c, g, or t
  misc_feature (146)..(146): n is a, c, g, or t
  misc_feature (148)..(148): n is a, c, g, or t
  misc_feature (213)..(213): n is a, c, g, or t
  misc_feature (252)..(252): n is a, c, g, or t
  misc_feature (272)..(272): n is a, c, g, or t
  misc_feature (306)..(306): n is a, c, g, or t
  misc_feature (339)..(339): n is a, c, g, or t
  misc_feature (374)..(374): n is a, c, g, or t
  misc_feature (394)..(394): n is a, c, g, or t
  misc_feature (436)..(436): n is a, c, g, or t
  misc_feature (438)..(438): n is a, c, g, or t

SEQ ID NO: 213490 - DNA, 416 bp, Canis familiaris; identical to SEQ ID NO: 3383
  misc_feature (9)..(9): n is a, c, g, or t
  misc_feature (52)..(52): n is a, c, g, or t
  misc_feature (62)..(62): n is a, c, g, or t
  misc_feature (92)..(92): n is a, c, g, or t
  misc_feature (108)..(108): n is a, c, g, or t
  misc_feature (112)..(112): n is a, c, g, or t
  misc_feature (115)..(115): n is a, c, g, or t
  misc_feature (120)..(120): n is a, c, g, or t
  misc_feature (142)..(142): n is a, c, g, or t
  misc_feature (159)..(159): n is a, c, g, or t
  misc_feature (161)..(161): n is a, c, g, or t
  misc_feature (183)..(183): n is a, c, g, or t
  misc_feature (197)..(197): n is a, c, g, or t
  misc_feature (209)..(209): n is a, c, g, or t
  misc_feature (230)..(230): n is a, c, g, or t
  misc_feature (269)..(269): n is a, c, g, or t
  misc_feature (283)..(283): n is a, c, g, or t
  misc_feature (294)..(294): n is a, c, g, or t
  misc_feature (300)..(300): n is a, c, g, or t
  misc_feature (331)..(332): n is a, c, g, or t
  misc_feature (342)..(342): n is a, c, g, or t
  misc_feature (345)..(345): n is a, c, g, or t
  misc_feature (347)..(347): n is a, c, g, or t
  misc_feature (353)..(353): n is a, c, g, or t
  misc_feature (367)..(367): n is a, c, g, or t
  misc_feature (383)..(383): n is a, c, g, or t
  misc_feature (392)..(392): n is a, c, g, or t

SEQ ID NO: 213491 - DNA, 260 bp, Canis familiaris; identical to SEQ ID NO: 3384
  misc_feature (108)..(108): n is a, c, g, or t
  misc_feature (120)..(120): n is a, c, g, or t
  misc_feature (134)..(134): n is a, c, g, or t
  misc_feature (177)..(177): n is a, c, g, or t
  misc_feature (198)..(198): n is a, c, g, or t
  misc_feature (235)..(235): n is a, c, g, or t

SEQ ID NO: 213492 - DNA, 538 bp, Canis familiaris; identical to SEQ ID NO: 3385
  misc_feature (39)..(39): n is a, c, g, or t
  misc_feature (123)..(123): n is a, c, g, or t
  misc_feature (143)..(143): n is a, c, g, or t
  misc_feature (212)..(212): n is a, c, g, or t
  misc_feature (245)..(245): n is a, c, g, or t
  misc_feature (282)..(282): n is a, c, g, or t
  misc_feature (324)..(324): n is a, c, g, or t
  misc_feature (331)..(331): n is a, c, g, or t
  misc_feature (334)..(334): n is a, c, g, or t
  misc_feature (358)..(358): n is a, c, g, or t
  misc_feature (360)..(360): n is a, c, g, or t
  misc_feature (380)..(380): n is a, c, g, or t
  misc_feature (423)..(423): n is a, c, g, or t
  misc_feature (452)..(452): n is a, c, g, or t
  misc_feature (471)..(471): n is a, c, g, or t

SEQ ID NO: 213493 - DNA, 390 bp, Canis familiaris; identical to SEQ ID NO: 3386
  misc_feature (15)..(15): n is a, c, g, or t
  misc_feature (57)..(57): n is a, c, g, or t
  misc_feature (80)..(80): n is a, c, g, or t
  misc_feature (96)..(96): n is a, c, g, or t
  misc_feature (178)..(178): n is a, c, g, or t
  misc_feature (207)..(207): n is a, c, g, or t
  misc_feature (225)..(225): n is a, c, g, or t
  misc_feature (228)..(228): n is a, c, g, or t
  misc_feature (247)..(247): n is a, c, g, or t
  misc_feature (256)..(256): n is a, c, g, or t
  misc_feature (289)..(289): n is a, c, g, or t
  misc_feature (309)..(309): n is a, c, g, or t
  misc_feature (326)..(326): n is a, c, g, or t
  misc_feature (344)..(344): n is a, c, g, or t
  misc_feature (361)..(361): n is a, c, g, or t

SEQ ID NO: 213494 - DNA, 483 bp, Canis familiaris; identical to SEQ ID NO: 3387
  misc_feature (207)..(207): n is a, c, g, or t
  misc_feature (421)..(421): n is a, c, g, or t
  misc_feature (436)..(436): n is a, c, g, or t
  misc_feature (443)..(444): n is a, c, g, or t
  misc_feature (447)..(447): n is a, c, g, or t
  misc_feature (453)..(453): n is a, c, g, or t
  misc_feature (456)..(457): n is a, c, g, or t

SEQ ID NO: 213495 - DNA, 444 bp, Canis familiaris; identical to SEQ ID NO: 3388
  misc_feature (354)..(354): n is a, c, g, or t
  misc_feature (386)..(386): n is a, c, g, or t
  misc_feature (414)..(414): n is a, c, g, or t

SEQ ID NO: 213496 - DNA, 352 bp, Canis familiaris; identical to SEQ ID NO: 3389
  misc_feature (203)..(203): n is a, c, g, or t
  misc_feature (209)..(209): n is a, c, g, or t
  misc_feature (218)..(218): n is a, c, g, or t
  misc_feature (343)..(343): n is a, c, g, or t

SEQ ID NO: 213497 - DNA, 307 bp, Canis familiaris; identical to SEQ ID NO: 3390
  misc_feature (19)..(19): n is a, c, g, or t
  misc_feature (141)..(141): n is a, c, g, or t
  misc_feature (216)..(216): n is a, c, g, or t
  misc_feature (259)..(259): n is a, c, g, or t
  misc_feature (283)..(283): n is a, c, g, or t
  misc_feature (292)..(292): n is a, c, g, or t

SEQ ID NO: 213498 - DNA, 269 bp, Canis familiaris; identical to SEQ ID NO: 3391
  misc_feature (101)..(101): n is a, c, g, or t
  misc_feature (137)..(137): n is a, c, g, or t
  misc_feature (151)..(151): n is a, c, g, or t
  misc_feature (195)..(195): n is a, c, g, or t
  misc_feature (229)..(229): n is a, c, g, or t
  misc_feature (237)..(237): n is a, c, g, or t
  misc_feature (256)..(256): n is a, c, g, or t

SEQ ID NO: 213499 - DNA, 368 bp, Canis familiaris; identical to SEQ ID NO: 3392
  misc_feature (142)..(142): n is a, c, g, or t
  misc_feature (146)..(146): n is a, c, g, or t
  misc_feature (168)..(168): n is a, c, g, or t
  misc_feature (181)..(181): n is a, c, g, or t
  misc_feature (230)..(230): n is a, c, g, or t
  misc_feature (252)..(252): n is a, c, g, or t
  misc_feature (277)..(277): n is a, c, g, or t
  misc_feature (282)..(282): n is a, c, g, or t
  misc_feature (300)..(300): n is a, c, g, or t
  misc_feature (322)..(322): n is a, c, g, or t

SEQ ID NO: 213500 - DNA, 347 bp, Canis familiaris; identical to SEQ ID NO: 3393
  misc_feature (80)..(80): n is a, c, g, or t
  misc_feature (145)..(145): n is a, c, g, or t
  misc_feature (148)..(148): n is a, c, g, or t
  misc_feature (267)..(267): n is a, c, g, or t
  misc_feature (276)..(276): n is a, c, g, or t
  misc_feature (292)..(292): n is a, c, g, or t
  misc_feature (328)..(328): n is a, c, g, or t

SEQ ID NO: 213501 - DNA, 483 bp, Canis familiaris; identical to SEQ ID NO: 3394
  misc_feature (25)..(25): n is a, c, g, or t
  misc_feature (32)..(32): n is a, c, g, or t
  misc_feature (34)..(34): n is a, c, g, or t
  misc_feature (42)..(42): n is a, c, g, or t
  misc_feature (59)..(60): n is a, c, g, or t
  misc_feature (95)..(95): n is a, c, g, or t
  misc_feature (256)..(256): n is a, c, g, or t
  misc_feature (258)..(258): n is a, c, g, or t
  misc_feature (337)..(337): n is a, c, g, or t
  misc_feature (416)..(416): n is a, c, g, or t

SEQ ID NO: 213502 - DNA, 308 bp, Canis familiaris; identical to SEQ ID NO: 3395
  misc_feature (24)..(24): n is a, c, g, or t
  misc_feature (29)..(29): n is a, c, g, or t
  misc_feature (44)..(44): n is a, c, g, or t
  misc_feature (46)..(46): n is a, c, g, or t
  misc_feature (89)..(89): n is a, c, g, or t
  misc_feature (140)..(140): n is a, c, g, or t
  misc_feature (148)..(148): n is a, c, g, or t
  misc_feature (165)..(165): n is a, c, g, or t
  misc_feature (223)..(223): n is a, c, g, or t
  misc_feature (264)..(264): n is a, c, g, or t
  misc_feature (275)..(275): n is a, c, g, or t

SEQ ID NO: 213503 - DNA, 474 bp, Canis familiaris; identical to SEQ ID NO: 3396
  misc_feature (3)..(3): n is a, c, g, or t
  misc_feature (11)..(11): n is a, c, g, or t
  misc_feature (18)..(18): n is a, c, g, or t
  misc_feature (201)..(201): n is a, c, g, or t
  misc_feature (243)..(243): n is a, c, g, or t
  misc_feature (282)..(282): n is a, c, g, or t
  misc_feature (313)..(313): n is a, c, g, or t
  misc_feature (352)..(354): n is a, c, g, or t
  misc_feature (356)..(356): n is a, c, g, or t
  misc_feature (366)..(366): n is a, c, g, or t
  misc_feature (396)..(396): n is a, c, g, or t
  misc_feature (420)..(420): n is a, c, g, or t
  misc_feature (436)..(437): n is a, c, g, or t
  misc_feature (449)..(449): n is a, c, g, or t

SEQ ID NO: 213504 - DNA, 527 bp, Canis familiaris; identical to SEQ ID NO: 3397
  misc_feature (31)..(31): n is a, c, g, or t
  misc_feature (45)..(45): n is a, c, g, or t

SEQ ID NO: 213505 - DNA, 511 bp, Canis familiaris; identical to SEQ ID NO: 3398

SEQ ID NO: 213506 - DNA, 361 bp, Canis familiaris; identical to SEQ ID NO: 3399
  misc_feature (144)..(144): n is a, c, g, or t
  misc_feature (277)..(277): n is a, c, g, or t
  misc_feature (354)..(354): n is a, c, g, or t

SEQ ID NO: 213507 - DNA, 369 bp, Canis familiaris; identical to SEQ ID NO: 3400
  misc_feature (142)..(142): n is a, c, g, or t
  misc_feature (193)..(193): n is a, c, g, or t
  misc_feature (247)..(247): n is a, c, g, or t
  misc_feature (259)..(259): n is a, c, g, or t
  misc_feature (337)..(337): n is a, c, g, or t
  misc_feature (347)..(347): n is a, c, g, or t
  misc_feature (355)..(355): n is a, c, g, or t

SEQ ID NO: 213508 - DNA, 398 bp, Canis familiaris; identical to SEQ ID NO: 3401

SEQ ID NO: 213509 - DNA, 490 bp, Canis familiaris; identical to SEQ ID NO: 3402
  misc_feature (146)..(146): n is a, c, g, or t
  misc_feature (280)..(280): n is a, c, g, or t
  misc_feature (305)..(305): n is a, c, g, or t
  misc_feature (357)..(357): n is a, c, g, or t
  misc_feature (379)..(379): n is a, c, g, or t
  misc_feature (384)..(384): n is a, c, g, or t
  misc_feature (443)..(443): n is a, c, g, or t
  misc_feature (463)..(463): n is a, c, g, or t
  misc_feature (478)..(478): n is a, c, g, or t
  misc_feature (482)..(482): n is a, c, g, or t

SEQ ID NO: 213510 - DNA, 600 bp, Canis familiaris
tggtatctttgttagagttgatgaacctatattgacacatcatcacccaaaatctatagttttccttagggttcacctttgctgttgtacattctgcatctggacagatgtacaatgccatgtatctgtcatcatagtatcacacacagtattttcacagccctaaaattcatccttcctctccaccccaacccttagcgaccactgatcattttactgttcccatagtttttgcctttttccagaacttcctgtagttggaatcataatgtgcaatcttttcagattggcttttcatttggtaatatgcatttgcctcctccatgtctttttatggcccgatggctttttagtaatgaataatattccatggtctggggggggctgggtggctcagtcggtaagtgttcactcttgatctggttcagtcatgatctcagggcctgagatggatgctcatcagctctgtgtccagcagggatctacagagattcctcccctcctcctcctttgcctctccttcacctaaataatactttttttaagcagatatgaagtccatccattatgttgattccgcctaactcttccagcgacatt

SEQ ID NO: 213511 - DNA, 300 bp, Canis familiaris; identical to SEQ ID NO: 3404
  misc_feature (23)..(23): n is a, c, g, or t
  misc_feature (183)..(183): n is a, c, g, or t
  misc_feature (187)..(187): n is a, c, g, or t
  misc_feature (253)..(253): n is a, c, g, or t
  misc_feature (290)..(290): n is a, c, g, or t

SEQ ID NO: 213512 - DNA, 407 bp, Canis familiaris; identical to SEQ ID NO: 3405
  misc_feature (88)..(88): n is a, c, g, or t
  misc_feature (238)..(238): n is a, c, g, or t
  misc_feature (244)..(244): n is a, c, g, or t
  misc_feature (248)..(248): n is a, c, g, or t
  misc_feature (382)..(382): n is a, c, g, or t

SEQ ID NO: 213513 - DNA, 430 bp, Canis familiaris; identical to SEQ ID NO: 3406
  misc_feature (30)..(30): n is a, c, g, or t
  misc_feature (159)..(159): n is a, c, g, or t
  misc_feature (168)..(168): n is a, c, g, or t
  misc_feature (188)..(188): n is a, c, g, or t
  misc_feature (193)..(193): n is a, c, g, or t
  misc_feature (276)..(276): n is a, c, g, or t
  misc_feature (295)..(295): n is a, c, g, or t
  misc_feature (387)..(387): n is a, c, g, or t
  misc_feature (413)..(413): n is a, c, g, or t

SEQ ID NO: 213514 - DNA, 287 bp, Canis familiaris; identical to SEQ ID NO: 3407
  misc_feature (94)..(94): n is a, c, g, or t
  misc_feature (115)..(115): n is a, c, g, or t
  misc_feature (141)..(141): n is a, c, g, or t
  misc_feature (174)..(174): n is a, c, g, or t
  misc_feature (194)..(194): n is a, c, g, or t
  misc_feature (218)..(218): n is a, c, g, or t
  misc_feature (220)..(220): n is a, c, g, or t
  misc_feature (260)..(260): n is a, c, g, or t
  misc_feature (279)..(279): n is a, c, g, or t

SEQ ID NO: 213515 - DNA, 259 bp, Canis familiaris; identical to SEQ ID NO: 3408
  misc_feature (155)..(155): n is a, c, g, or t
  misc_feature (162)..(162): n is a, c, g, or t
  misc_feature (166)..(166): n is a, c, g, or t
  misc_feature (168)..(168): n is a, c, g, or t
  misc_feature (198)..(198): n is a, c, g, or t

SEQ ID NO: 213516 - DNA, 503 bp, Canis familiaris; identical to SEQ ID NO: 3409
  misc_feature (68)..(68): n is a, c, g, or t
  misc_feature (83)..(83): n is a, c, g, or t
  misc_feature (287)..(287): n is a, c, g, or t
  misc_feature (326)..(326): n is a, c, g, or t
  misc_feature (364)..(364): n is a, c, g, or t
  misc_feature (374)..(374): n is a, c, g, or t
  misc_feature (393)..(393): n is a, c, g, or t
  misc_feature (427)..(427): n is a, c, g, or t
  misc_feature (438)..(438): n is a, c, g, or t
  misc_feature (440)..(440): n is a, c, g, or t
  misc_feature (445)..(445): n is a, c, g, or t
  misc_feature (465)..(465): n is a, c, g, or t

SEQ ID NO: 213517 - DNA, 213 bp, Canis familiaris; identical to SEQ ID NO: 3410
  misc_feature (62)..(62): n is a, c, g, or t
  misc_feature (103)..(103): n is a, c, g, or t
  misc_feature (111)..(111): n is a, c, g, or t
  misc_feature (135)..(135): n is a, c, g, or t
  misc_feature (145)..(145): n is a, c, g, or t
  misc_feature (169)..(169): n is a, c, g, or t

SEQ ID NO: 213518 - DNA, 428 bp, Canis familiaris; identical to SEQ ID NO: 3411
  misc_feature (202)..(202): n is a, c, g, or t
  misc_feature (220)..(220): n is a, c, g, or t
  misc_feature (231)..(231): n is a, c, g, or t
  misc_feature (236)..(236): n is a, c, g, or t
  misc_feature (246)..(246): n is a, c, g, or t
  misc_feature (276)..(276): n is a, c, g, or t
  misc_feature (295)..(295): n is a, c, g, or t
  misc_feature (409)..(409): n is a, c, g, or t

SEQ ID NO: 213519 - DNA, 477 bp, Canis familiaris; identical to SEQ ID NO: 3412
  misc_feature (374)..(374): n is a, c, g, or t
  misc_feature (389)..(389): n is a, c, g, or t
  misc_feature (400)..(400): n is a, c, g, or t
  misc_feature (429)..(429): n is a, c, g, or t
  misc_feature (457)..(457): n is a, c, g, or t

SEQ ID NO: 213520 - DNA, 456 bp, Canis familiaris; identical to SEQ ID NO: 3413
  misc_feature (174)..(174): n is a, c, g, or t
  misc_feature (326)..(326): n is a, c, g, or t
  misc_feature (331)..(331): n is a, c, g, or t
  misc_feature (359)..(359): n is a, c, g, or t
  misc_feature (391)..(391): n is a, c, g, or t
  misc_feature (395)..(395): n is a, c, g, or t

SEQ ID NO: 213521 - DNA, 600 bp, Canis familiaris
aaaatagagctgagatttggattttgagatgtttagggaaaatctaggtggagaaatacacagatctggactttggtggaggtgtcagtgtataactaacttcagatacctatctcaatgagtcttttctcctgggatggttccctctgaggtggacacctcttctctggggagcagactgtaggcatgctgggaaccagtgggggaagtgatggggatatcatcagtcacttaatcctctgtgttccatccagatcttactccaagttctactttgcctgggtcctgaagtctgaagccactttggctcagttctcctgtggttattccaagcctttctgggactagctgtcttcttgtcacaattctctgtgccaacattgctttcctcatcttggcaactcaagatggttggtcaggtactgggcatctcttagtatcattgaggaatgttgtggtttctgtccctcctcttgttattgggagtgttccctgctggatctttgatcccattccactcaagaaaataccaattctcactaccttcgatcgggacatccgatgacctctacaatccgacttcgtcagacggttttttct

SEQ ID NO: 213522 - DNA, 426 bp, Canis familiaris; identical to SEQ ID NO: 3415
  misc_feature (192)..(192): n is a, c, g, or t
  misc_feature (202)..(202): n is a, c, g, or t
  misc_feature (324)..(324): n is a, c, g, or t
  misc_feature (341)..(341): n is a, c, g, or t
  misc_feature (359)..(359): n is a, c, g, or t

SEQ ID NO: 213523 - DNA, 600 bp, Canis familiaris
  misc_feature (525)..(525): n is a, c, g, or t
agggatcctgatgtgggactcgatccctaaacagggatcatgccctgagccaaaggcagatgctcagccactgagccacccaggcatcccccaacttgttttttaaatgtgtttctaacccacttgaatatacttttaagataccctgtagcatgaggccacccacatatcttgtatgtggttgcttatctaatcatagttcaagtggctgagtatacattttaaaaaatcaaaacataattggaatttaggctagcctgcttgtattaagacaattcctctttagttttttaaaatttcagatttttactaaaagaaaaatctagtatcttgataactaaaattttaaaaaattggttaggtacagaattacagattatgcttggaaattgttcacagacaaagtacctagggacataaaattctttatttacctatcagccactattgggtagtctgcatattaaacaagacgttaaaaaattacagcccagttagcaggcagtgctatttagtcactagttnattttaatctcccagycttgttatcagtctgatgacawttttcacccttggggtagtacttcccaggaacccagc

SEQ ID NO: 213524 - DNA, 455 bp, Canis familiaris; identical to SEQ ID NO: 3417

SEQ ID NO: 213525 - DNA, 548 bp, Canis familiaris; identical to SEQ ID NO: 3418
  misc_feature (357)..(357): n is a, c, g, or t
  misc_feature (359)..(359): n is a, c, g, or t
  misc_feature (438)..(438): n is a, c, g, or t

SEQ ID NO: 213526 - DNA, 334 bp, Canis familiaris; identical to SEQ ID NO: 3419
  misc_feature (9)..(9): n is a, c, g, or t
  misc_feature (56)..(56): n is a, c, g, or t

SEQ ID NO: 213527 - DNA, 327 bp, Canis familiaris; identical to SEQ ID NO: 3420
  misc_feature (144)..(144): n is a, c, g, or t
  misc_feature (175)..(175): n is a, c, g, or t
  misc_feature (203)..(203): n is a, c, g, or t
  misc_feature (225)..(225): n is a, c, g, or t
  misc_feature (231)..(231): n is a, c, g, or t
  misc_feature (243)..(243): n is a, c, g, or t
  misc_feature (250)..(250): n is a, c, g, or t
  misc_feature (271)..(271): n is a, c, g, or t
  misc_feature (291)..(291): n is a, c, g, or t
  misc_feature (304)..(304): n is a, c, g, or t
  misc_feature (313)..(313): n is a, c, g, or t

SEQ ID NO: 213528 - DNA, 530 bp, Canis familiaris; identical to SEQ ID NO: 3421

SEQ ID NO: 213529 - DNA, 431 bp, Canis familiaris; identical to SEQ ID NO: 3422
  misc_feature (33)..(34): n is a, c, g, or t
  misc_feature (70)..(70): n is a, c, g, or t
  misc_feature (98)..(98): n is a, c, g, or t
  misc_feature (108)..(108): n is a, c, g, or t
  misc_feature (135)..(135): n is a, c, g, or t
  misc_feature (143)..(143): n is a, c, g, or t
  misc_feature (162)..(162): n is a, c, g, or t
  misc_feature (171)..(171): n is a, c, g, or t
  misc_feature (177)..(177): n is a, c, g, or t
  misc_feature (194)..(194): n is a, c, g, or t
  misc_feature (199)..(199): n is a, c, g, or t
  misc_feature (207)..(207): n is a, c, g, or t
  misc_feature (284)..(284): n is a, c, g, or t
  misc_feature (388)..(388): n is a, c, g, or t

SEQ ID NO: 213530 - DNA, 505 bp, Canis familiaris; identical to SEQ ID NO: 3423
  misc_feature (117)..(117): n is a, c, g, or t
  misc_feature (285)..(285): n is a, c, g, or t
  misc_feature (345)..(345): n is a, c, g, or t
  misc_feature (390)..(390): n is a, c, g, or t
  misc_feature (405)..(405): n is a, c, g, or t
  misc_feature (440)..(440): n is a, c, g, or t
  misc_feature (461)..(461): n is a, c, g, or t
  misc_feature (466)..(466): n is a, c, g, or t

SEQ ID NO: 213531 - DNA, 364 bp, Canis familiaris; identical to SEQ ID NO: 3424
  misc_feature (178)..(178): n is a, c, g, or t
  misc_feature (298)..(298): n is a, c, g, or t

SEQ ID NO: 213532 - DNA, 565 bp, Canis familiaris; identical to SEQ ID NO: 3425

SEQ ID NO: 213533 - DNA, 654 bp, Canis familiaris; identical to SEQ ID NO: 3426
  misc_feature (31)..(31): n is a, c, g, or t
  misc_feature (101)..(101): n is a, c, g, or t

SEQ ID NO: 213534 - DNA, 423 bp, Canis familiaris; identical to SEQ ID NO: 3427
  misc_feature (60)..(60): n is a, c, g, or t
  misc_feature (111)..(111): n is a, c, g, or t
  misc_feature (116)..(116): n is a, c, g, or t
  misc_feature (166)..(166): n is a, c, g, or t
  misc_feature (231)..(231): n is a, c, g, or t
  misc_feature (257)..(257): n is a, c, g, or t
  misc_feature (264)..(264): n is a, c, g, or t
  misc_feature (344)..(344): n is a, c, g, or t
  misc_feature (365)..(365): n is a, c, g, or t
  misc_feature (403)..(403): n is a, c, g, or t

SEQ ID NO: 213535 - DNA, 275 bp, Canis familiaris; identical to SEQ ID NO: 3428
  misc_feature (17)..(17): n is a, c, g, or t
  misc_feature (46)..(46): n is a, c, g, or t
  misc_feature (74)..(74): n is a, c, g, or t
  misc_feature (83)..(83): n is a, c, g, or t
  misc_feature (90)..(90): n is a, c, g, or t
  misc_feature (100)..(100): n is a, c, g, or t
  misc_feature (127)..(127): n is a, c, g, or t
  misc_feature (139)..(139): n is a, c, g, or t
  misc_feature (145)..(145): n is a, c, g, or t
  misc_feature (147)..(147): n is a, c, g, or t
  misc_feature (149)..(149): n is a, c, g, or t
  misc_feature (184)..(184): n is a, c, g, or t
  misc_feature (229)..(229): n is a, c, g, or t
  misc_feature (254)..(254): n is a, c, g, or t
  misc_feature (263)..(263): n is a, c, g, or t
  misc_feature (269)..(269): n is a, c, g, or t

SEQ ID NO: 213536 - DNA, 354 bp, Canis familiaris; identical to SEQ ID NO: 3429
  misc_feature (39)..(39): n is a, c, g, or t
  misc_feature (52)..(52): n is a, c, g, or t
  misc_feature (70)..(70): n is a, c, g, or t
  misc_feature (87)..(87): n is a, c, g, or t
  misc_feature (99)..(99): n is a, c, g, or t
  misc_feature (104)..(104): n is a, c, g, or t
  misc_feature (137)..(137): n is a, c, g, or t
  misc_feature (143)..(143): n is a, c, g, or t
  misc_feature (164)..(164): n is a, c, g, or t
  misc_feature (166)..(166): n is a, c, g, or t
  misc_feature (208)..(208): n is a, c, g, or t
  misc_feature (238)..(238): n is a, c, g, or t
  misc_feature (252)..(252): n is a, c, g, or t
  misc_feature (283)..(283): n is a, c, g, or t
  misc_feature (297)..(297): n is a, c, g, or t
  misc_feature (340)..(340): n is a, c, g, or t

SEQ ID NO: 213537 - DNA, 584 bp, Canis familiaris; identical to SEQ ID NO: 3430

SEQ ID NO: 213538 - DNA, 496 bp, Canis familiaris; identical to SEQ ID NO: 3431
  misc_feature (228)..(228): n is a, c, g, or t
  misc_feature (342)..(342): n is a, c, g, or t
  misc_feature (386)..(386): n is a, c, g, or t
  misc_feature (437)..(437): n is a, c, g, or t
  misc_feature (439)..(439): n is a, c, g, or t
  misc_feature (445)..(445): n is a, c, g, or t
  misc_feature (463)..(463): n is a, c, g, or t

SEQ ID NO: 213539 - DNA, 236 bp, Canis familiaris; identical to SEQ ID NO: 3432
  misc_feature (6)..(6): n is a, c, g, or t
  misc_feature (14)..(14): n is a, c, g, or t
  misc_feature (101)..(101): n is a, c, g, or t
  misc_feature (163)..(163): n is a, c, g, or t
  misc_feature (170)..(170): n is a, c, g, or t
  misc_feature (177)..(177): n is a, c, g, or t
  misc_feature (191)..(191): n is a, c, g, or t
  misc_feature (199)..(199): n is a, c, g, or t
  misc_feature (202)..(202): n is a, c, g, or t
  misc_feature (222)..(222): n is a, c, g, or t

SEQ ID NO: 213540 - DNA, 413 bp, Canis familiaris; identical to SEQ ID NO: 3433
  misc_feature (389)..(389): n is a, c, g, or t

SEQ ID NO: 213541 - DNA, 359 bp, Canis familiaris; identical to SEQ ID NO: 3434
  misc_feature (64)..(64): n is a, c, g, or t
  misc_feature (239)..(239): n is a, c, g, or t
  misc_feature (255)..(255): n is a, c, g, or t
  misc_feature (287)..(287): n is a, c, g, or t
  misc_feature (322)..(322): n is a, c, g, or t
  misc_feature (328)..(328): n is a, c, g, or t

SEQ ID NO: 213542 - DNA, 434 bp, Canis familiaris; identical to SEQ ID NO: 3435
  misc_feature (17)..(17): n is a, c, g, or t
  misc_feature (120)..(120): n is a, c, g, or t
  misc_feature (133)..(133): n is a, c, g, or t
  misc_feature (165)..(165): n is a, c, g, or t
  misc_feature (182)..(182): n is a, c, g, or t
  misc_feature (192)..(192): n is a, c, g, or t
  misc_feature (216)..(216): n is a, c, g, or t
  misc_feature (245)..(245): n is a, c, g, or t
  misc_feature (262)..(262): n is a, c, g, or t
  misc_feature (297)..(297): n is a, c, g, or t
  misc_feature (305)..(305): n is a, c, g, or t
  misc_feature (310)..(310): n is a, c, g, or t
  misc_feature (312)..(312): n is a, c, g, or t
  misc_feature (344)..(344): n is a, c, g, or t
  misc_feature (346)..(346): n is a, c, g, or t
  misc_feature (350)..(350): n is a, c, g, or t
  misc_feature (355)..(355): n is a, c, g, or t
  misc_feature (363)..(363): n is a, c, g, or t
  misc_feature (394)..(394): n is a, c, g, or t
  misc_feature (401)..(401): n is a, c, g, or t
  misc_feature (405)..(405): n is a, c, g, or t

SEQ ID NO: 213543 - DNA, 1147 bp, Canis familiaris; identical to SEQ ID NO: 3436

SEQ ID NO: 213544 - DNA, 600 bp, Canis familiaris
  misc_feature (452)..(452): n is a, c, g, or t
  misc_feature (564)..(564): n is a, c, g, or t
ctgcgttggaaataacccgcctctagtgctgttggtatgcaaggcagcggtgcttaaacaatatttcctgtgctcaccagagacaaaaatgtaccaatttcctgacaccattctcttccatttatttccagtggttaccttgagtcttgactattagaagtgcccacgacgggtctaaccttgattaaacagatcgtgtattatgatctcgctgcagcgacagtgcagctccatgttcaatctacagaccaaaccgtttgtatctggcatcacttactaacacatgccctgcggctttttctgcgtcacctgscaggacagttgaggaatgtcggtataccggtataagagaaggatagaaaattgatactgttttaataatctgtatttcagttttttttttttttttgctgaaatacatatattgatgtttagatattcatgatcaagtntataacttgatgttataaccccttaatcttggtggtgtcagtggactgagcatttctgccaagcatgtccctattgtcttccctgtcgtccamctggtaaattcgttattcntcctttgacatgtcgatcttccatgcgtgtcaatct

SEQ ID NO: 213545 - DNA, 558 bp, Canis familiaris; identical to SEQ ID NO: 3438
  misc_feature (503)..(503): n is a, c, g, or t
  misc_feature (530)..(530): n is a, c, g, or t

SEQ ID NO: 213546 - DNA, 351 bp, Canis familiaris; identical to SEQ ID NO: 3439
  misc_feature (19)..(19): n is a, c, g, or t
  misc_feature (26)..(26): n is a, c, g, or t
  misc_feature (88)..(88): n is a, c, g, or t
  misc_feature (124)..(124): n is a, c, g, or t
  misc_feature (130)..(130): n is a, c, g, or t
  misc_feature (141)..(141): n is a, c, g, or t
  misc_feature (158)..(158): n is a, c, g, or t
  misc_feature (165)..(165): n is a, c, g, or t
  misc_feature (192)..(192): n is a, c, g, or t
  misc_feature (201)..(201): n is a, c, g, or t
  misc_feature (231)..(231): n is a, c, g, or t
  misc_feature (245)..(245): n is a, c, g, or t
  misc_feature (262)..(262): n is a, c, g, or t
  misc_feature (299)..(299): n is a, c, g, or t
  misc_feature (320)..(320): n is a, c, g, or t
  misc_feature (332)..(332): n is a, c, g, or t

SEQ ID NO: 213547 - DNA, 466 bp, Canis familiaris; identical to SEQ ID NO: 3440
  misc_feature (266)..(266): n is a, c, g, or t
  misc_feature (343)..(343): n is a, c, g, or t
  misc_feature (365)..(365): n is a, c, g, or t
  misc_feature (372)..(372): n is a, c, g, or t
  misc_feature (418)..(418): n is a, c, g, or t
  misc_feature (442)..(442): n is a, c, g, or t
  misc_feature (444)..(444): n is a, c, g, or t

SEQ ID NO: 213548 - DNA, 519 bp, Canis familiaris; identical to SEQ ID NO: 3441
  misc_feature (182)..(182): n is a, c, g, or t
  misc_feature (203)..(203): n is a, c, g, or t
  misc_feature (229)..(229): n is a, c, g, or t
  misc_feature (373)..(373): n is a, c, g, or t
  misc_feature (381)..(381): n is a, c, g, or t
  misc_feature (398)..(398): n is a, c, g, or t
  misc_feature (407)..(407): n is a, c, g, or t
  misc_feature (427)..(427): n is a, c, g, or t
  misc_feature (436)..(436): n is a, c, g, or t
  misc_feature (461)..(461): n is a, c, g, or t
  misc_feature (469)..(469): n is a, c, g, or t
  misc_feature (472)..(472): n is a, c, g, or t
  misc_feature (493)..(493): n is a, c, g, or t

SEQ ID NO: 213549 - DNA, 330 bp, Canis familiaris; identical to SEQ ID NO: 3442
  misc_feature (72)..(73): n is a, c, g, or t
  misc_feature (306)..(306): n is a, c, g, or t

SEQ ID NO: 213550 - DNA, 466 bp, Canis familiaris; identical to SEQ ID NO: 3443

SEQ ID NO: 213551 - DNA, 408 bp, Canis familiaris; identical to SEQ ID NO: 3444

SEQ ID NO: 213552 - DNA, 353 bp, Canis familiaris; identical to SEQ ID NO: 3445
  misc_feature (86)..(86): n is a, c, g, or t
  misc_feature (108)..(108): n is a, c, g, or t

SEQ ID NO: 213553 - DNA, 555 bp, Canis familiaris; identical to SEQ ID NO: 3446

SEQ ID NO: 213554 - DNA, 600 bp, Canis familiaris
caccatagaagagcctgccctctattcccccttggaacatcctgtagcaagtatcattcatgggactttcaaaaaggatacttactgggaatgaacttttctaagtaggggagggatggctgtatggtttaccaggtcctgtgtccaatgtcagttatgcgagtcaccaagctggaggccattccaggagtggaattattcatgaaactctgctgagttttcccaatgggaggaaagtattcccttctttcctgcccttcccaaacggaagggactgctctgggaaggattctcccaccactcctcaactgaccatagacttttagaaagtaaaatgtaagactagcaactagcaagggtgctcatagtcttactacagaacactaaagagccaggtaggaaagagtggagcatggttgacaatatagagaggatttttaaacaccacgcttatagatcatctttaaggacgattttaaatagagagggtcatttgttttacctgaataacttttgtcttcagttcaaatcatcccccaggaagtctgctatcaaatcaaggtcactctctatctatttgtagagtcaatgaatgaggcc

SEQ ID NO: 213555 - DNA, 600 bp, Canis familiaris
ctattctcagaaagatgttatcagtttgtcatttggatgtgggttcagtggaagaagaaacaggacttggtggctacagtgggaggctggaggttggccatgggctgcgtgtccctaaggctcccaagcgtgaggtctctctgccaggcgtccttttcccacagatacaagtcacagttcccgttctgcctctcacatcgaatgtctagagcttcaccaacaggagaagcttcagatggttgaaaattgaagtgcacttgggacacattctgttcctttgtgctttgcctgtgggtctgtaggaaggtcattgatgcctcagccgcagtcttttgctctgctgtgattttctatgaactgcgctgagggtttgacgattatctcaaaatagtctttgaggagatcccccgttgtctcagggctccaagargagttagctcacaggatcagatgtgcttagcatgtatgtggccccgtcctcmatatgtagctgtggtttcagagattcgtccaccgttgcacatggcacaaagktttgggacgarccaaacgtacgtcacaaactccaatactgctttaaaatgcatcccaggataacat

SEQ ID NO: 213556 - DNA, 494 bp, Canis familiaris; identical to SEQ ID NO: 3449
  misc_feature (221)..(222): n is a, c, g, or t
  misc_feature (227)..(227): n is a, c, g, or t
  misc_feature (451)..(451): n is a, c, g, or t

SEQ ID NO: 213557 - DNA, 340 bp, Canis familiaris; identical to SEQ ID NO: 3450
  misc_feature (45)..(45): n is a, c, g, or t
  misc_feature (155)..(155): n is a, c, g, or t
  misc_feature (175)..(175): n is a, c, g, or t

SEQ ID NO: 213558 - DNA, 380 bp, Canis familiaris; identical to SEQ ID NO: 3451
  misc_feature (348)..(348): n is a, c, g, or t

SEQ ID NO: 213559 - DNA, 844 bp, Canis familiaris; identical to SEQ ID NO: 3452
  misc_feature (199)..(199): n is a, c, g, or t
  misc_feature (351)..(351): n is a, c, g, or t

SEQ ID NO: 213560 - DNA, 375 bp, Canis familiaris; identical to SEQ ID NO: 3453
  misc_feature (197)..(197): n is a, c, g, or t
  misc_feature (204)..(204): n is a, c, g, or t
  misc_feature (361)..(361): n is a, c, g, or t

SEQ ID NO: 213561 - DNA, 343 bp, Canis familiaris; identical to SEQ ID NO: 3454
  misc_feature (234)..(234): n is a, c, g, or t

SEQ ID NO: 213562 - DNA, 399 bp, Canis familiaris; identical to SEQ ID NO: 3455
  misc_feature (36)..(36): n is a, c, g, or t
  misc_feature (236)..(236): n is a, c, g, or t
  misc_feature (240)..(243): n is a, c, g, or t
  misc_feature (281)..(281): n is a, c, g, or t
  misc_feature (297)..(297): n is a, c, g, or t
  misc_feature (377)..(377): n is a, c, g, or t

SEQ ID NO: 213563 - DNA, 380 bp, Canis familiaris; identical to SEQ ID NO: 3456
  misc_feature (75)..(75): n is a, c, g, or t
  misc_feature (223)..(223): n is a, c, g, or t
  misc_feature (225)..(227): n is a, c, g, or t
  misc_feature (351)..(351): n is a, c, g, or t
  misc_feature (367)..(367): n is a, c, g, or t

SEQ ID NO: 213564 - DNA, 369 bp, Canis familiaris; identical to SEQ ID NO: 3457
  misc_feature (27)..(27): n is a, c, g, or t
  misc_feature (167)..(167): n is a, c, g, or t
  misc_feature (216)..(216): n is a, c, g, or t
  misc_feature (219)..(219): n is a, c, g, or t
  misc_feature (222)..(222): n is a, c, g, or t

SEQ ID NO: 213565 - DNA, 600 bp, Canis familiaris
  misc_feature (263)..(263): n is a, c, g, or t
ttcaagataaagtttttgcttctgcttttgttctctctgttgtcagtgtgtgtgtgtgtgtgtgtgtgtgtgtgtgtgtgtgtatgtttwgagagagggatcatawgttatrggatcaaaaagacaggggcacwaytcctcaaataacctgtatccatrggccaaaatagctattcaaatcwttgaataawatgttagtctaataarttgtttgctccatarggtatgggacaatgtatttytcttttctytcttttttktgnacaatttatttttcaaggcaatttgggataactggaagaacacaaactctgggattggagggagctgagcttgaatctgagctctcagtttycctagctttctcatcttagtctatytcttaacttcttagattttaaattatctccactattactaaattcaaagtcatagtaaggattaagtgaatatatggtaaagtttttagcatagttcctggtactctgcagctaatagtttaggaatcctgaagacagagtatatggactgaactgtgtcccaccaaccccccaaaatcctgtgttgaagccctaacccccaatgtgattacatttggag

SEQ ID NO: 213566 - DNA, 271 bp, Canis familiaris; identical to SEQ ID NO: 3459
  misc_feature (33)..(33): n is a, c, g, or t
  misc_feature (157)..(157): n is a, c, g, or t
  misc_feature (183)..(183): n is a, c, g, or t
  misc_feature (204)..(204): n is a, c, g, or t
  misc_feature (211)..(211): n is a, c, g, or t
  misc_feature (217)..(217): n is a, c, g, or t
  misc_feature (227)..(227): n is a, c, g, or t

SEQ ID NO: 213567 - DNA, 399 bp, Canis familiaris; identical to SEQ ID NO: 3460
  misc_feature (226)..(226): n is a, c, g, or t
  misc_feature (358)..(358): n is a, c, g, or t

SEQ ID NO: 213568 - DNA, 370 bp, Canis familiaris; identical to SEQ ID NO: 3461

SEQ ID NO: 213569 - DNA, 367 bp, Canis familiaris; identical to SEQ ID NO: 3462
  misc_feature (34)..(34): n is a, c, g, or t
  misc_feature (137)..(137): n is a, c, g, or t
  misc_feature (142)..(142): n is a, c, g, or t
  misc_feature (193)..(193): n is a, c, g, or t
  misc_feature (217)..(217): n is a, c, g, or t
  misc_feature (222)..(222): n is a, c, g, or t

SEQ ID NO: 213570 - DNA, 517 bp, Canis familiaris; identical to SEQ ID NO: 3463
  misc_feature (17)..(17): n is a, c, g, or t
  misc_feature (62)..(62): n is a, c, g, or t
  misc_feature (502)..(502): n is a, c, g, or t

SEQ ID NO: 213571 - DNA, 310 bp, Canis familiaris; identical to SEQ ID NO: 3464
  misc_feature (6)..(6): n is a, c, g, or t
  misc_feature (22)..(22): n is a, c, g, or t
  misc_feature (53)..(54): n is a, c, g, or t
  misc_feature (59)..(59): n is a, c, g, or t
  misc_feature (101)..(102): n is a, c, g, or t
  misc_feature (108)..(108): n is a, c, g, or t
  misc_feature (129)..(129): n is a, c, g, or t
  misc_feature (134)..(134): n is a, c, g, or t
  misc_feature (141)..(141): n is a, c, g, or t
  misc_feature (149)..(149): n is a, c, g, or t
  misc_feature (192)..(192): n is a, c, g, or t
  misc_feature (213)..(213): n is a, c, g, or t
  misc_feature (252)..(252): n is a, c, g, or t
  misc_feature (293)..(293): n is a, c, g, or t

SEQ ID NO: 213572 - DNA, 334 bp, Canis familiaris; identical to SEQ ID NO: 3465
  misc_feature (277)..(277): n is a, c, g, or t
  misc_feature (286)..(286): n is a, c, g, or t
  misc_feature (291)..(291): n is a, c, g, or t

SEQ ID NO: 213573 - DNA, 600 bp, Canis familiaris
  misc_feature (137)..(137): n is a, c, g, or t
cacggacaattataaaatattacttatttttataatctttgaaacgaatttaaaataccattttctgaaacccagttgactcatttttatcacttgccagaagaaaaaagcatctttcataaaattgagcacctgcntacagaattgtaaatctgtgtttacatgtatttaaaaacctctggtaaactgttggaacaggatgaaaatctccttagacaagacctagggggaattaacaaagcctgagccacacatatcctatctttgtcatacctgtgtggagtcagcttccctctggctcagttagaagttctcaaacwtcagtttgcatcagattcaccggtgtgtgtgtgtgtgtgtgtgtgtgtgtgtgtgtgtgtawaacacaacgcmtcctgtgaccccactcctagagtttctgattcagtaggtgtctgcagtggggctcagaatttgcatttctaacatgttcccaggtgatgctgatgccagggacccagcagagaactattgctctggcttgaattctctaagaaagaatgttctttttacataagaggacttctatatttaggctttctatgccttgggagtattgta

SEQ ID NO: 213574 - DNA, 600 bp, Canis familiaris
ctctaacttttgtcaactactgaaatgtttctatctttatagtttcatctttttgaaaatgttataatggactcatacagaacacaggcttttgtctctkggcttctttccatttagcattaaakattttkggaggattcatmcacagtgtgcgtgtgtgtgtgtgtgtgtgtgtgagagagagagagagagagagagagagaaagagagagaggcagagacacaggcagagatagagagagacagagaatgaaggagagaatttttttctttttttaattgccaagtagtattctgttgtatggctagaccacagtttgtttatccattcacctgctgatggaattggactaatttgttctagttttagaaaattatgaataaagtctatattcttttataaaaagaataaattttatttatttgaaacagagagaaagagagagagagatagagcaagcacaagcaagggggagggatagagggagagggagagggagaagcagactcctggctgagcagggagccagatgcaggacgccaacccagaaccctgggatcatgacctgagccaaaggcagacacttaaccgacctagcc

SEQ ID NO: 213575 - DNA, 600 bp, Canis familiaris
  misc_feature (256)..(256): n is a, c, g, or t
ttcattacttcctggttttcyttgagagcttcaatgtgttagttatatttaattatggtatggcccagagagaagatggagtagaaacagtgtgtggatggagccatggaggaaaggagagggtggggcttgcagaggggaaagaaaacagttcaggttggctggagtgcaggcagatacagggtacagtagacaaagtgcaaagtctattgtgaagcaagctcaagagtgtatatttattttttctgtatttagncamagraggwggtgtgtgtgtgtgtgtgtgtgtgtgtgtgtgtgtgtgtgtgtgtctcaggattggtcattttatgccgatggggatgagtmtgacaacattacaactmacataaattgatggtcctattgttgaataaccgtgtcagtatcattttgttttagaactgttgctcatccagtaaaactgttgggcatgtggggacttttcaatgtacatgtcacttttgatccttggagaagacacgggagacacacccttgctgacaaagtagacctgggcagttgtgtctaaactgcatcatcctgctcacttttacccccacccggacaggttaaatccaa

SEQ ID NO: 213576 - DNA, 250 bp, Canis familiaris; identical to SEQ ID NO: 3469
  misc_feature (20)..(20): n is a, c, g, or t
  misc_feature (23)..(23): n is a, c, g, or t
  misc_feature (123)..(123): n is a, c, g, or t
  misc_feature (181)..(181): n is a, c, g, or t
  misc_feature (207)..(209): n is a, c, g, or t
  misc_feature (230)..(230): n is a, c, g, or t

SEQ ID NO: 213577 - DNA, 368 bp, Canis familiaris; identical to SEQ ID NO: 3470
  misc_feature (180)..(180): n is a, c, g, or t
  misc_feature (184)..(184): n is a, c, g, or t
  misc_feature (186)..(186): n is a, c, g, or t
  misc_feature (351)..(351): n is a, c, g, or t

SEQ ID NO: 213578 - DNA, 526 bp, Canis familiaris; identical to SEQ ID NO: 3471

SEQ ID NO: 213579 - DNA, 418 bp, Canis familiaris; identical to SEQ ID NO: 3472
  misc_feature (214)..(214): n is a, c, g, or t
  misc_feature (229)..(229): n is a, c, g, or t
  misc_feature (234)..(234): n is a, c, g, or t
  misc_feature (247)..(247): n is a, c, g, or t
  misc_feature (255)..(256): n is a, c, g, or t
  misc_feature (258)..(258): n is a, c, g, or t
  misc_feature (265)..(265): n is a, c, g, or t
  misc_feature (269)..(269): n is a, c, g, or t
  misc_feature (272)..(272): n is a, c, g, or t
  misc_feature (289)..(289): n is a, c, g, or t
  misc_feature (292)..(292): n is a, c, g, or t
  misc_feature (297)..(297): n is a, c, g, or t

SEQ ID NO: 213580 - DNA, 342 bp, Canis familiaris; identical to SEQ ID NO: 3473
  misc_feature (189)..(189): n is a, c, g, or t
  misc_feature (329)..(329): n is a, c, g, or t

SEQ ID NO: 213581 - DNA, 320 bp, Canis familiaris; identical to SEQ ID NO: 3474
  misc_feature (52)..(52): n is a, c, g, or t
  misc_feature (87)..(87): n is a, c, g, or t
  misc_feature (178)..(178): n is a, c, g, or t
  misc_feature (197)..(197): n is a, c, g, or t
  misc_feature (211)..(211): n is a, c, g, or t
  misc_feature (214)..(214): n is a, c, g, or t
  misc_feature (222)..(222): n is a, c, g, or t
  misc_feature (226)..(226): n is a, c, g, or t
  misc_feature (255)..(255): n is a, c, g, or t
  misc_feature (264)..(264): n is a, c, g, or t
  misc_feature (270)..(270): n is a, c, g, or t
  misc_feature (279)..(280): n is a, c, g, or t
  misc_feature (289)..(289): n is a, c, g, or t
  misc_feature (301)..(301): n is a, c, g, or t

SEQ ID NO: 213582 - DNA, 201 bp, Canis familiaris; identical to SEQ ID NO: 3475
  misc_feature (69)..(69): n is a, c, g, or t
  misc_feature (74)..(74): n is a, c, g, or t
  misc_feature (81)..(81): n is a, c, g, or t
  misc_feature (84)..(84): n is a, c, g, or t
  misc_feature (102)..(103): n is a, c, g, or t
  misc_feature (125)..(125): n is a, c, g, or t

SEQ ID NO: 213583 - DNA, 369 bp, Canis familiaris; identical to SEQ ID NO: 3476
  misc_feature (205)..(205): n is a, c, g, or t
  misc_feature (316)..(317): n is a, c, g, or t
  misc_feature (340)..(340): n is a, c, g, or t

SEQ ID NO: 213584 - DNA, 321 bp, Canis familiaris; identical to SEQ ID NO: 3477
  misc_feature (22)..(22): n is a, c, g, or t
  misc_feature (144)..(144): n is a, c, g, or t
  misc_feature (152)..(152): n is a, c, g, or t
  misc_feature (161)..(161): n is a, c, g, or t
  misc_feature (187)..(187): n is a, c, g, or t
  misc_feature (194)..(196): n is a, c, g, or t
  misc_feature (213)..(213): n is a, c, g, or t
  misc_feature (240)..(240): n is a, c, g, or t
  misc_feature (243)..(243): n is a, c, g, or t

SEQ ID NO: 213585 - DNA, 400 bp, Canis familiaris; identical to SEQ ID NO: 3478
  misc_feature (196)..(197): n is a, c, g, or t

SEQ ID NO: 213586 - DNA, 417 bp, Canis familiaris; identical to SEQ ID NO: 3479
  misc_feature (372)..(373): n is a, c, g, or t
  misc_feature (383)..(383): n is a, c, g, or t
  misc_feature (403)..(403): n is a, c, g, or t

SEQ ID NO: 213587 - DNA, 335 bp, Canis familiaris; identical to SEQ ID NO: 3480
  misc_feature (33)..(33): n is a, c, g, or t
  misc_feature (36)..(36): n is a, c, g, or t
  misc_feature (198)..(198): n is a, c, g, or t
  misc_feature (219)..(219): n is a, c, g, or t
  misc_feature (223)..(223): n is a, c, g, or t

SEQ ID NO: 213588 - DNA, 380 bp, Canis familiaris; identical to SEQ ID NO: 3481
  misc_feature (203)..(203): n is a, c, g, or t
  misc_feature (205)..(205): n is a, c, g, or t
  misc_feature (360)..(360): n is a, c, g, or t

SEQ ID NO: 213589 - DNA, 314 bp, Canis familiaris; identical to SEQ ID NO: 3482
  misc_feature (187)..(188): n is a, c, g, or t
  misc_feature (273)..(273): n is a, c, g, or t
  misc_feature (278)..(278): n is a, c, g, or t

SEQ ID NO: 213590 - DNA, 600 bp, Canis familiaris
  misc_feature (125)..(125): n is a, c, g, or t
actttccccaagggctgaggggctgtggggctgagttagctacagggaaacgagtaatgggcaatgtgccaggagacaagcatggactggagccaaacacatttaacagcagggcatggctggtnaccctggacttcctggccacctgtggatgctaatagaatgtcttttccatatcctctaggcttcctggaaatgagctcccttgctgatgcagtgattgattgcatatccgtatctcttcctgaccgtgaccccctaaactgccttccatccctcctttcgcatggttcctaccacatttctttttctcctcccctttagccttctctcttttcaggccaggagaagaagtcaggacctgggggtgcaagaggccaaagtctcagtgcctcacatccctgagcagtgtgtgtgtgtgtgtgtgtgtgtgtgtgtgtgaggtacatgcattccagagctggattgtctgcattctaatcctgactccacaatttccgagctgtgtgaattcgggcaagtgacttaaccactctatgccttggttttctcaagctggtaggatgaggataacaatagtagttagctctgggaaagtta

SEQ ID NO: 213591 - DNA, 406 bp, Canis familiaris; identical to SEQ ID NO: 3484
  misc_feature (216)..(216): n is a, c, g, or t
  misc_feature (263)..(263): n is a, c, g, or t
  misc_feature (274)..(274): n is a, c, g, or t

SEQ ID NO: 213592 - DNA, 466 bp, Canis familiaris; identical to SEQ ID NO: 3485
  misc_feature (36)..(36): n is a, c, g, or t
  misc_feature (107)..(108): n is a, c, g, or t
  misc_feature (180)..(180): n is a, c, g, or t
  misc_feature (209)..(209): n is a, c, g, or t
  misc_feature (371)..(372): n is a, c, g, or t

SEQ ID NO: 213593 - DNA, 341 bp, Canis familiaris; identical to SEQ ID NO: 3486
  misc_feature (214)..(219): n is a, c, g, or t

SEQ ID NO: 213594 - DNA, 436 bp, Canis familiaris; identical to SEQ ID NO: 3487
  misc_feature (431)..(431): n is a, c, g, or t

SEQ ID NO: 213595 - DNA, 307 bp, Canis familiaris; identical to SEQ ID NO: 3488

SEQ ID NO: 213596 - DNA, 395 bp, Canis familiaris; identical to SEQ ID NO: 3489

SEQ ID NO: 213597 - DNA, 403 bp, Canis familiaris; identical to SEQ ID NO: 3490
  misc_feature (202)..(202): n is a, c, g, or t
  misc_feature (204)..(204): n is a, c, g, or t
  misc_feature (359)..(359): n is a, c, g, or t
  misc_feature (369)..(369): n is a, c, g, or t

SEQ ID NO: 213598 - DNA, 401 bp, Canis familiaris; identical to SEQ ID NO: 3491
  misc_feature (205)..(205): n is a, c, g, or t

SEQ ID NO: 213599 - DNA, 386 bp, Canis familiaris; identical to SEQ ID NO: 3492
  misc_feature (50)..(50): n is a, c, g, or t
  misc_feature (202)..(202): n is a, c, g, or t

SEQ ID NO: 213600 - DNA, 329 bp, Canis familiaris; identical to SEQ ID NO: 3493
  misc_feature (146)..(146): n is a, c, g, or t
  misc_feature (148)..(148): n is a, c, g, or t

SEQ ID NO: 213601 - DNA, 360 bp, Canis familiaris; identical to SEQ ID NO: 3494

SEQ ID NO: 213602 - DNA, 175 bp, Canis familiaris; identical to SEQ ID NO: 3495
  misc_feature (130)..(130): n is a, c, g, or t
  misc_feature (145)..(145): n is a, c, g, or t
  misc_feature (147)..(147): n is a, c, g, or t

SEQ ID NO: 213603 - DNA, 370 bp, Canis familiaris; identical to SEQ ID NO: 3496
  misc_feature (27)..(27): n is a, c, g, or t
  misc_feature (141)..(141): n is a, c, g, or t
  misc_feature (213)..(213): n is a, c, g, or t
  misc_feature (216)..(216): n is a, c, g, or t
  misc_feature (329)..(329): n is a, c, g, or t

SEQ ID NO: 213604 - DNA, 341 bp, Canis familiaris; identical to SEQ ID NO: 3497
  misc_feature (50)..(50): n is a, c, g, or t
  misc_feature (71)..(71): n is a, c, g, or t
  misc_feature (73)..(73): n is a, c, g, or t
  misc_feature (77)..(78): n is a, c, g, or t
  misc_feature (81)..(81): n is a, c, g, or t
  misc_feature (111)..(111): n is a, c, g, or t
  misc_feature (120)..(120): n is a, c, g, or t
  misc_feature (173)..(173): n is a, c, g, or t
  misc_feature (177)..(177): n is a, c, g, or t
  misc_feature (181)..(181): n is a, c, g, or t
  misc_feature (187)..(187): n is a, c, g, or t
  misc_feature (190)..(190): n is a, c, g, or t
  misc_feature (272)..(272): n is a, c, g, or t
  misc_feature (278)..(278): n is a, c, g, or t
  misc_feature (322)..(322): n is a, c, g, or t
  misc_feature (329)..(329): n is a, c, g, or t
  misc_feature (337)..(337): n is a, c, g, or t

SEQ ID NO: 213605 - DNA, 430 bp, Canis familiaris; identical to SEQ ID NO: 3498
  misc_feature (206)..(206): n is a, c, g, or t
  misc_feature (364)..(364): n is a, c, g, or t
  misc_feature (381)..(381): n is a, c, g, or t

SEQ ID NO: 213606 - DNA, 380 bp, Canis familiaris; identical to SEQ ID NO: 3499
  misc_feature (201)..(201): n is a, c, g, or t
  misc_feature (296)..(296): n is a, c, g, or t
  misc_feature (323)..(323): n is a, c, g, or t
  misc_feature (349)..(349): n is a, c, g, or t

SEQ ID NO: 213607 - DNA, 435 bp, Canis familiaris; identical to SEQ ID NO: 3500

SEQ ID NO: 213608 - DNA, 350 bp, Canis familiaris; identical to SEQ ID NO: 3501
  misc_feature (102)..(102): n is a, c, g, or t
  misc_feature (142)..(142): n is a, c, g, or t
  misc_feature (195)..(195): n is a, c, g, or t
  misc_feature (306)..(306): n is a, c, g, or t
  misc_feature (317)..(317): n is a, c, g, or t
  misc_feature (325)..(325): n is a, c, g, or t
  misc_feature (336)..(336): n is a, c, g, or t

SEQ ID NO: 213609 - DNA, 310 bp, Canis familiaris; identical to SEQ ID NO: 3502
  misc_feature (27)..(27): n is a, c, g, or t
  misc_feature (220)..(220): n is a, c, g, or t
  misc_feature (222)..(222): n is a, c, g, or t
  misc_feature (224)..(224): n is a, c, g, or t
  misc_feature (235)..(235): n is a, c, g, or t
  misc_feature (268)..(268): n is a, c, g, or t
  misc_feature (280)..(280): n is a, c, g, or t
  misc_feature (294)..(294): n is a, c, g, or t

SEQ ID NO: 213610 - DNA, 345 bp, Canis familiaris; identical to SEQ ID NO: 3503
  misc_feature (101)..(101): n is a, c, g, or t
  misc_feature (137)..(137): n is a, c, g, or t
  misc_feature (260)..(260): n is a, c, g, or t
  misc_feature (278)..(278): n is a, c, g, or t
  misc_feature (287)..(288): n is a, c, g, or t
  misc_feature (295)..(295): n is a, c, g, or t
  misc_feature (301)..(301): n is a, c, g, or t
  misc_feature (308)..(308): n is a, c, g, or t
  misc_feature (318)..(318): n is a, c, g, or t
  misc_feature (341)..(341): n is a, c, g, or t

SEQ ID NO: 213611 - DNA, 360 bp, Canis familiaris; identical to SEQ ID NO: 3504
  misc_feature (202)..(202): n is a, c, g, or t
  misc_feature (226)..(226): n is a, c, g, or t
  misc_feature (231)..(231): n is a, c, g, or t
  misc_feature (263)..(263): n is a, c, g, or t

SEQ ID NO: 213612 - DNA, 312 bp, Canis familiaris; identical to SEQ ID NO: 3505

SEQ ID NO: 213613 - DNA, 600 bp, Canis familiaris
  misc_feature (222)..(222): n is a, c, g, or t
  misc_feature (234)..(234): n is a, c, g, or t
  misc_feature (428)..(430): n is a, c, g, or t
  misc_feature (481)..(481): n is a, c, g, or t
ctggctgaattgttagctggccgtggtcaatgacagacatgaacctatgtctcatctgggtctcatccactatgtgtcattgagacccatgtctcaatcctgggtcagaatctcctaatgagaatttaaaggctatctctgtctctctgtctctctctctctctcacacacacacacacacacacacacacacacacacaaaccagggttaaacccatggtnaaaggttaagtnagattttggtttccatccgtttccaatggtgggtccatcttttccacaatatatatcaaaacatccaagctgtacatcttcagtatacacgctttttacatgtcaaagtcacctaaagctttaaagaaaacacaaaggccaggcaccaccccaggtgaatggaatcagaattcctgggggtgaagccaggcatnnnttgacggaagtttctgcgggccttggagcacccctgctttaactcactgtntctgctcttgctcatgcattgttcacaggacttttcttagtggacaaagttttccttatcctcacatttttggagggggtacctcacctggggattagacgaactgaaagggaaccaag

SEQ ID NO: 213614 - DNA, 600 bp, Canis familiaris
ctgtccctggtggaattgggccctggttggaggtggagtcaagctccaaaaccgagaatcctgtctccagtatgattgtgacaagtggctgactacttctcttctccccctgctccaaaggtgctccagtccctggttcacttggccaccctcactatgtgtgaagaggagaccaccgcgctcgtgtgtggacaatggctctggctgtgcaaggctggcttcgcagggggatgatgcccccccgctgtcttcccctctatcgtgggccgccctcgccaccaagtatgtgctcatctggaccaaagctttgagctactaggaraaaghccckcayagtggacaccgtattgtactctgagtgtgtgtgagagagawgtgtgwgcatgagagttgtgtgtgtgtgtgtgtgtgtgtgtgtgtgtgtgttgaaggtgagggactctcttctgagtcccttcagatagaaatatccaggaccaaacccaacataccccaggchtgcagggatggaattatgtctggcttaagttctttggggttgctaggtttggaagaaactttttacaaacrcgacmcagtaaacaagaccatgcctttaag

SEQ ID NO: 213615 - DNA, 470 bp, Canis familiaris; identical to SEQ ID NO: 3508

SEQ ID NO: 213616 - DNA, 462 bp, Canis familiaris; identical to SEQ ID NO: 3509
  misc_feature (399)..(399): n is a, c, g, or t

SEQ ID NO: 213617 - DNA, 543 bp, Canis familiaris; identical to SEQ ID NO: 3510

SEQ ID NO: 213618 - DNA, 600 bp, Canis familiaris
  misc_feature (164)..(164): n is a, c, g, or t
  misc_feature (393)..(393): n is a, c, g, or t
  misc_feature (420)..(420): n is a, c, g, or t
  misc_feature (491)..(491): n is a, c, g, or t
accacagcaacttagttaacacctccatcacctcatatatttagctttttgttatggttagaacaccttaaggtctacttccttagcaactttcaagtttataatacagtatcgttgactattaccaccaagctgtgaccagcatttccctgatttcccccatnccctaccttctggcaaccacctttctattctgtttctctgaattcagcttttttaaagattccacatataagtgagatcatacagtatgtggctttctctgcctgaattatctcacttagcatcatgccctgcagttatcagaaatgtcaggaatccttctttctcatggctgcagaatttccagtgtgtgtgtgtgtgtgtgtgtgtgtgtgtttttctttattcatntgtctatcgatggacattaccttgttntggtacttcacctaatatgattattttctcaccattacactgggattatgggtgtggagaagaaagagcanatcttttcatctgtccccattggaaggaagtccccgtatgtagcccacatgtgaagagctgggagttggctccacctcatcaaggacttaaatttcttttcctcatcca

SEQ ID NO: 213619 - DNA, 420 bp, Canis familiaris; identical to SEQ ID NO: 3512

SEQ ID NO: 213620 - DNA, 450 bp, Canis familiaris; identical to SEQ ID NO: 3513
  misc_feature (99)..(99): n is a, c, g, or t
  misc_feature (158)..(158): n is a, c, g, or t

SEQ ID NO: 213621 - DNA, 287 bp, Canis familiaris; identical to SEQ ID NO: 3514
  misc_feature (78)..(78): n is a, c, g, or t
  misc_feature (82)..(82): n is a, c, g, or t
  misc_feature (103)..(104): n is a, c, g, or t
  misc_feature (151)..(151): n is a, c, g, or t
  misc_feature (170)..(170): n is a, c, g, or t

SEQ ID NO: 213622 - DNA, 377 bp, Canis familiaris; identical to SEQ ID NO: 3515
  misc_feature (156)..(156): n is a, c, g, or t

SEQ ID NO: 213623 - DNA, 380 bp, Canis familiaris; identical to SEQ ID NO: 3516

SEQ ID NO: 213624 - DNA, 600 bp, Canis familiaris
ctctacggactccatggtagtgacaagatgtgagggagccatcagggactgagatgggcatgggtctggagagggtaacccaggccatgccatcctcaggagcggggtcagaggcccttaatgtagctgactgcaggtggcgctgcacactccaaggagctccagagggggagagaccacagcaatagagttaagtgtgagaaagtgagtcagggagacagagcccgtawaggggtgtgtgtgtgtgtgtgtgtgtgtgtgtgtgtgtgtgagagagagagagagagatggctatttgaatawatgaacaggaagatattgtctttgtatttgcctccaatcatttgcttaagatttatttactaagctcctaccctgtgttatgctaactgstggacactggacacatggacaatatgacacaagacctccatcaagacatgtgcactctggtggggcataggataaatacacagacatcacccagaaamcatrctgagtscggagatggagggakgcaaggggaccgaagggcacccagaagagamgcctggggcagattcagaggctcctccahacatagcatcagcagagatgaga

SEQ ID NO: 213625 - DNA, 475 bp, Canis familiaris; identical to SEQ ID NO: 3518

SEQ ID NO: 213626 - DNA, 600 bp, Canis familiaris
  misc_feature (384)..(385): n is a, c, g, or t
gtcacaagcacaataaacaaccccagcttccaaaatgaatccttcgtgatgccctcaatccaggccttccttcatcttggcaggaggaggattttatcaacctgtcactatccaatcagtcattggatttcaggagggagggagatgataagtgtgtcccttctaacacacaatggaaattgaaattaatctaattagtttgaaggagcacttcaatgccatggtggtaggcactgaatgcagagatgtaagacagaaatacagatgaaaattgatggttactttcatcctagttcacaagattagaggtgatttccagggatttgttttatcattaaaattccatataatgatgaaacccaactgcttagctctttaaatacnnaccccctcacacacacacacacacacacacaccttgataacaggtaggtaaaaggttataaaggttacaaacaaatcagttctagcttccgtatttcttctttggctttgatgacggtgtaagatgtcttctttttttcttcctccagtgtaaaatatgtaaccaagatggccaggttcaatttgtgcagtggcttatgataaatacctggggtt

SEQ ID NO: 213627 - DNA, 356 bp, Canis familiaris; identical to SEQ ID NO: 3520
  misc_feature (11)..(11): n is a, c, g, or t
  misc_feature (129)..(129): n is a, c, g, or t
  misc_feature (132)..(134): n is a, c, g, or t

SEQ ID NO: 213628 - DNA, 408 bp, Canis familiaris; identical to SEQ ID NO: 3521

SEQ ID NO: 213629 - DNA, 360 bp, Canis familiaris; identical to SEQ ID NO: 3522
  misc_feature (109)..(109): n is a, c, g, or t
  misc_feature (122)..(122): n is a, c, g, or t
  misc_feature (126)..(126): n is a, c, g, or t
  misc_feature (141)..(142): n is a, c, g, or t

SEQ ID NO: 213630 - DNA, 108 bp, Canis familiaris; identical to SEQ ID NO: 3523
  misc_feature (72)..(72): n is a, c, g, or t
  misc_feature (83)..(84): n is a, c, g, or t
  misc_feature (86)..(87): n is a, c, g, or t

SEQ ID NO: 213631 - DNA, 243 bp, Canis familiaris; identical to SEQ ID NO: 3524
  misc_feature (78)..(78): n is a, c, g, or t
  misc_feature (170)..(170): n is a, c, g, or t
  misc_feature (180)..(180): n is a, c, g, or t
  misc_feature (201)..(201): n is a, c, g, or t
  misc_feature (215)..(215): n is a, c, g, or t

SEQ ID NO: 213632 - DNA, 433 bp, Canis familiaris; identical to SEQ ID NO: 3525
  misc_feature (94)..(96): n is a, c, g, or t

SEQ ID NO: 213633 - DNA, 316 bp, Canis familiaris; identical to SEQ ID NO: 3526

SEQ ID NO: 213634 - DNA, 359 bp, Canis familiaris; identical to SEQ ID NO: 3527
  misc_feature (289)..(289): n is a, c, g, or t
  misc_feature (303)..(303): n is a, c, g, or t

SEQ ID NO: 213635 - DNA, 380 bp, Canis familiaris; identical to SEQ ID NO: 3528
  misc_feature (114)..(114): n is a, c, g, or t
  misc_feature (170)..(170): n is a, c, g, or t
  misc_feature (173)..(173): n is a, c, g, or t

SEQ ID NO: 213636 - DNA, 331 bp, Canis familiaris; identical to SEQ ID NO: 3529
  misc_feature (38)..(38): n is a, c, g, or t
  misc_feature (129)..(129): n is a, c, g, or t
  misc_feature (191)..(191): n is a, c, g, or t
  misc_feature (291)..(291): n is a, c, g, or t

SEQ ID NO: 213637 - DNA, 360 bp, Canis familiaris; identical to SEQ ID NO: 3530

SEQ ID NO: 213638 - DNA, 600 bp, Canis familiaris
tcaggcastagtagactcattttctgaaagagttattcaacatgggaatttgtcttgtaggtttctcttaataatcttgagcatattttcaagttggaactcaatttaataaagtactctcgttcttttgcaatgtktattattatggggctaaaagaacattcctaattccctcaagagcktaggtattctcttcacagrgaagactgtgttacactcttgggttggtacattgagaatatctgtattcctcagartgaktatwttgtggtagagatagtgtthtgcgtcctagattggttaggggtgtgtgtgtatgtgtgtgtgtgtgtgtgtgtgtgtgtgtgtatttctagccacccccttccttgtccatagttatgaatcttgtctgggaaatagaccctgacagcaatattatgtattaacgtgtattcatagcagctaatatttttttaatttttaattatttatgatagtcacacacacacacacacagagagagagagagagagagaggcagagacatagkcagagggagwagcaggctccatgcaccgggagcctgacatgggattcgatcccgagtctccaggatcg

SEQ ID NO: 213639 - DNA, 600 bp, Canis familiaris
atcagccgtagctaaggagcaaaacaggtatttatgtttcaaagtatcttagagctcagattaggaaaattagcaaaatgagattaagtcatgtgggaagagaagaaggaaacggcctacggcatccctagtctgagccagtcactgaactcatgtgtgtgtgtgtgtgtgtgtgtgtgtgtgtgtccstrtggtgtgttgtgtgttccctatttttatccattacaataatttctattgaatcctttgaaatagcccctgactcaccctcttcctactcccatctttctttgtacctaacagctataataattggtttataaatggaggcataattactcgcctagttggaactcttcagtggcttcccatctcacttcagaaatacacaaaatgtgtaacatgcccacaggactccctataacctagcctgggtctacctctgaagccctgtcaggtgccacccactcccctgctccccgtgctttcaacatatcagcctccttccagttccttgcccatgctactttctttcttgtctgcaggtctttgcagatgctaagatgcccttattccagcytgctggctagtttcaattta

SEQ ID NO: 213640 - DNA, 600 bp, Canis familiaris
  misc_feature (210)..(210): n is a, c, g, or t
gaggaatgacattaataagaaatcagccgtagctaaggagcaaaacaggtatttatgtttcaaagtatcttagagctcagattaggaaaattagcaaaatgagattaagtcatgtgggaagagaagaaggaaacggcctacggcatccctagtctgagccagtcactgaactcatgtgtgtgtgtgtgtgtgtgtgtgtgtgtgtgtccntattttatcattacaataattctattgaatccctttgaaatagcccctgactcaccctcttacctactcccatctttctttgtacctaacagctataataattggtttataaatggaggcataattactcgcctagttggaactcttcagtggcttcccatctcacttcagaaatacacaaaatgtgtaacatgcccacaggactccctataacctagcctgggtctacctctgaagccctgtcaggtgccacccactcccctgctccccgtgctttcaacatatcagcctccttccagttccttgcccatgctactttctttcttgtctgcaggtctttgcagatgctaagatgcccttattgccagcttgctggctagtttcaattta

SEQ ID NO: 213641 - DNA, 391 bp, Canis familiaris; identical to SEQ ID NO: 3534
  misc_feature (26)..(26): n is a, c, g, or t

SEQ ID NO: 213642 - DNA, 359 bp, Canis familiaris; identical to SEQ ID NO: 3535
  misc_feature (71)..(71): n is a, c, g, or t
  misc_feature (117)..(118): n is a, c, g, or t

SEQ ID NO: 213643 - DNA, 329 bp, Canis familiaris; identical to SEQ ID NO: 3536
  misc_feature (210)..(210): n is a, c, g, or t

SEQ ID NO: 213644 - DNA, 317 bp, Canis familiaris; identical to SEQ ID NO: 3537
  misc_feature (35)..(35): n is a, c, g, or t
  misc_feature (51)..(51): n is a, c, g, or t
  misc_feature (192)..(192): n is a, c, g, or t
  misc_feature (201)..(201): n is a, c, g, or t
  misc_feature (205)..(205): n is a, c, g, or t
  misc_feature (218)..(218): n is a, c, g, or t
  misc_feature (261)..(261): n is a, c, g, or t

SEQ ID NO: 213645 - DNA, 397 bp, Canis familiaris; identical to SEQ ID NO: 3538

SEQ ID NO: 213646 - DNA, 479 bp, Canis familiaris; identical to SEQ ID NO: 3539

SEQ ID NO: 213647 - DNA, 426 bp, Canis familiaris; identical to SEQ ID NO: 3540
  misc_feature (127)..(127): n is a, c, g, or t
  misc_feature (371)..(371): n is a, c, g, or t
  misc_feature (375)..(375): n is a, c, g, or t
  misc_feature (386)..(386): n is a, c, g, or t
  misc_feature (394)..(394): n is a, c, g, or t

SEQ ID NO: 213648 - DNA, 340 bp, Canis familiaris; identical to SEQ ID NO: 3541
  misc_feature (70)..(70): n is a, c, g, or t

SEQ ID NO: 213649 - DNA, 397 bp, Canis familiaris; identical to SEQ ID NO: 3542
  misc_feature (42)..(42): n is a, c, g, or t
  misc_feature (190)..(190): n is a, c, g, or t
  misc_feature (338)..(338): n is a, c, g, or t

SEQ ID NO: 213650 - DNA, 600 bp, Canis familiaris
  misc_feature (246)..(246): n is a, c, g, or t
  misc_feature (269)..(269): n is a, c, g, or t
  misc_feature (453)..(453): n is a, c, g, or t
  misc_feature (569)..(569): n is a, c, g, or t
tgaaatgttttcctaggggagaggaagtcccattccgtaatggaagtagacgaggcaaatgagacctagtttgcagaaacgtgcatcgtggccaatgctgcycacatctgctgcctcaagtggaagacaaatgtctctgtcttgaagttcccctttttcctgagccaagcacttctggacattgtcaagttggctgtggctaaggctttgtggcaaatgtgccatggaatctagaagaactcatgnactggggactccaagaaccttgnccatttggccttcacccttaggaagatacggcggtcctggacacacacacacacacacacacacacacacccagctggttcctaaaccgcagagagggaagaagtcagagaggcaggaaccccacctacaccgaagctgaaggggggggggtctctattccaaagtcctgagttgcttcccccndtctgccacccttcttcaagccttgttgtagggtttggagagccaagtactatttttagaaatgtttattcttactcctttcttcccttccattctcaacctctctggaatgagcnctgaatgttcccctgctgggagcctttccac

SEQ ID NO: 213651 - DNA, 600 bp, Canis familiaris
  misc_feature (31)..(31): n is a, c, g, or t
  misc_feature (64)..(64): n is a, c, g, or t
  misc_feature (72)..(72): n is a, c, g, or t
aaggagtggctgggatgaaycacgagtttgnacattcccatggaaggtcaaaactgggatgggncagtgttnccaaacattgggacaggatgaggcctyggggtgggaaggtggcacccagggyggattacccagagcagttgccacatgcagaccagtagatgtccaagtacacacacacacacacacacacacacacacaccactccccagggctccaggcctgtcagcccttggtcatagaacatctctgtgctggctactgagtatgaccaggacaggccaagtccatgcccttgagcagctctgggccatagggaaacaggcaagttaagttatattcttggggcctcaggggaggagcacaccacccagcatcgggtgggatgcagggaggacttcttggtggaaggctgaagaaccaggaggcatcamtcaggtgaagcatgggattggcagtctaggcagaggggatatcttgtgcaaaagctttgacgcacaagaaacatcccacctgtggcctagaaggggtgcaggcatggggatgctcctccaatccacactgaacaaactctgagcacctgtttcttccaacagtgg

SEQ ID NO: 213652 - DNA, 350 bp, Canis familiaris; identical to SEQ ID NO: 3545
  misc_feature (27)..(27): n is a, c, g, or t
  misc_feature (30)..(31): n is a, c, g, or t
  misc_feature (126)..(126): n is a, c, g, or t
  misc_feature (166)..(166): n is a, c, g, or t
  misc_feature (198)..(198): n is a, c, g, or t
  misc_feature (217)..(217): n is a, c, g, or t
  misc_feature (277)..(277): n is a, c, g, or t
  misc_feature (320)..(320): n is a, c, g, or t

SEQ ID NO: 213653 - DNA, 335 bp, Canis familiaris; identical to SEQ ID NO: 3546
  misc_feature (144)..(147): n is a, c, g, or t
  misc_feature (229)..(229): n is a, c, g, or t
  misc_feature (240)..(249): n is a, c, g, or t
  misc_feature (261)..(261): n is a, c, g, or t
  misc_feature (281)..(282): n is a, c, g, or t

SEQ ID NO: 213654 - DNA, 435 bp, Canis familiaris; identical to SEQ ID NO: 3547
  misc_feature (256)..(257): n is a, c, g, or t
  misc_feature (399)..(399): n is a, c, g, or t

SEQ ID NO: 213655 - DNA, 430 bp, Canis familiaris; identical to SEQ ID NO: 3548
  misc_feature (48)..(48): n is a, c, g, or t
  misc_feature (407)..(407): n is a, c, g, or t

SEQ ID NO: 213656 - DNA, 450 bp, Canis familiaris; identical to SEQ ID NO: 3549
  misc_feature (200)..(200): n is a, c, g, or t

SEQ ID NO: 213657 - DNA, 400 bp, Canis familiaris; identical to SEQ ID NO: 3550
  misc_feature (193)..(193): n is a, c, g, or t
  misc_feature (216)..(216): n is a, c, g, or t
  misc_feature (223)..(224): n is a, c, g, or t

SEQ ID NO: 213658 - DNA, 600 bp, Canis familiaris
  misc_feature (145)..(145): n is a, c, g, or t
  misc_feature (169)..(169): n is a, c, g, or t
  misc_feature (178)..(178): n is a, c, g, or t
  misc_feature (181)..(181): n is a, c, g, or t
  misc_feature (189)..(189): n is a, c, g, or t
tttgagcatatggagggaaacctccacagttaacacttactggtcatttagtaggtgccatgcctgggtgaaaggttcacagcattagtaatttaatcctcccagtgaaccttaattagggatattatccctgttttatgaatgnaggaaattaaccatagaaagtttnaaatatctnytnccagtgtncatgtgttggccaagccaagattcaaactctgacagtytagctccaaagcccagtagtatakggctgtctggacaggtgtgtgtgtgtgtgtgtgtgtgtgtgtgtgtgtgtgtatacacatgttcatgaatctacatatgtaggtatgcatgtgccgcctggcagctcagaggtggtagtgatgggtgttttttatttcagccatgtggcatctccttttctcgcttggtaaacarccctcttgtcttcgggggaccttcttctacgtgacttcagggcttgttgctcagagtcctgggcgccatggcacattgggcctctcagacctctcctctggatgttgaatctggaatagagttgtccttgcactgtgccctgaggaggtggcctggaagctcctgcccctctct

SEQ ID NO: 213659 - DNA, 290 bp, Canis familiaris; identical to SEQ ID NO: 3552
  misc_feature (222)..(222): n is a, c, g, or t
  misc_feature (243)..(243): n is a, c, g, or t

SEQ ID NO: 213660 - DNA, 420 bp, Canis familiaris; identical to SEQ ID NO: 3553
  misc_feature (82)..(82): n is a, c, g, or t

SEQ ID NO: 213661 - DNA, 395 bp, Canis familiaris; identical to SEQ ID NO: 3554
  misc_feature (194)..(194): n is a, c, g, or t
  misc_feature (197)..(197): n is a, c, g, or t
  misc_feature (320)..(320): n is a, c, g, or t
  misc_feature (337)..(337): n is a, c, g, or t
  misc_feature (352)..(352): n is a, c, g, or t

SEQ ID NO: 213662 - DNA, 407 bp, Canis familiaris; identical to SEQ ID NO: 3555
  misc_feature (49)..(49): n is a, c, g, or t
  misc_feature (87)..(87): n is a, c, g, or t

SEQ ID NO: 213663 - DNA, 408 bp, Canis familiaris; identical to SEQ ID NO: 3556
  misc_feature (128)..(128): n is a, c, g, or t
  misc_feature (130)..(130): n is a, c, g, or t

SEQ ID NO: 213664 - DNA, 414 bp, Canis familiaris; identical to SEQ ID NO: 3557
  misc_feature (127)..(127): n is a, c, g, or t
  misc_feature (132)..(132): n is a, c, g, or t
  misc_feature (188)..(188): n is a, c, g, or t

SEQ ID NO: 213665 - DNA, 406 bp, Canis familiaris; identical to SEQ ID NO: 3558
  misc_feature (61)..(61): n is a, c, g, or t
  misc_feature (303)..(303): n is a, c, g, or t

SEQ ID NO: 213666 - DNA, 432 bp, Canis familiaris; identical to SEQ ID NO: 3559
  misc_feature (192)..(192): n is a, c, g, or t

SEQ ID NO: 213667 - DNA, 532 bp, Canis familiaris; identical to SEQ ID NO: 3560
  misc_feature (136)..(136): n is a, c, g, or t

SEQ ID NO: 213668 - DNA, 440 bp, Canis familiaris; identical to SEQ ID NO: 3561

SEQ ID NO: 213669 - DNA, 381 bp, Canis familiaris; identical to SEQ ID NO: 3562
  misc_feature (147)..(147): n is a, c, g, or t
  misc_feature (155)..(155): n is a, c, g, or t
  misc_feature (205)..(205): n is a, c, g, or t
  misc_feature (221)..(221): n is a, c, g, or t
  misc_feature (299)..(299): n is a, c, g, or t
  misc_feature (314)..(314): n is a, c, g, or t
  misc_feature (330)..(330): n is a, c, g, or t

SEQ ID NO: 213670 - DNA, 524 bp, Canis familiaris; identical to SEQ ID NO: 3563

SEQ ID NO: 213671 - DNA, 344 bp, Canis familiaris; identical to SEQ ID NO: 3564
  misc_feature (187)..(187): n is a, c, g, or t
  misc_feature (238)..(238): n is a, c, g, or t
  misc_feature (242)..(242): n is a, c, g, or t
  misc_feature (317)..(317): n is a, c, g, or t
  misc_feature (337)..(337): n is a, c, g, or t

SEQ ID NO: 213672 - DNA, 350 bp, Canis familiaris; identical to SEQ ID NO: 3565
  misc_feature (245)..(245): n is a, c, g, or t
  misc_feature (259)..(259): n is a, c, g, or t
  misc_feature (264)..(264): n is a, c, g, or t
  misc_feature (270)..(270): n is a, c, g, or t
  misc_feature (276)..(278): n is a, c, g, or t
  misc_feature (290)..(290): n is a, c, g, or t
  misc_feature (296)..(296): n is a, c, g, or t
  misc_feature (302)..(302): n is a, c, g, or t
  misc_feature (310)..(310): n is a, c, g, or t
  misc_feature (319)..(319): n is a, c, g, or t

SEQ ID NO: 213673 - DNA, 600 bp, Canis familiaris
  misc_feature (50)..(52): n is a, c, g, or t
  misc_feature (212)..(212): n is a, c, g, or t
  misc_feature (219)..(219): n is a, c, g, or t
tacatcaaactatacttgtgtggggtgcaatgagcagccctcacacccvnnnttctctactaaagagcttaaatgtctgagagaaaataccagcatctggcccacctctgggtgaagctgcaataaaaaaattgaaatcaaacggcttgaatctcagaagagaagggggacaccagtagggaaatatagagtacatattcattcaacaaatnacttagncgtttttatgtgccaggcacagtgccatgaactatgaaaatagcaaaggccaaagcaggtaaaggccctscctatatggagaktgtatwtgtaggacgtttgarakacaccctgtacaactcayasrcacacacacacacacacacacacacacacacacaaagtataggttactttttataartgacctaagtttttttctgtgtctcccctatcattaagagagaaaaatataaatgtgatttttttaatgaatgaagaggaaactccccatttttggtgggacttcagttttattattttttttaagattttatttatttattcatgagagacacaaagagagagagagaggcagagacacagacagagggagaagca

SEQ ID NO: 213674 - DNA, 430 bp, Canis familiaris; identical to SEQ ID NO: 3567
  misc_feature (150)..(154): n is a, c, g, or t
  misc_feature (333)..(333): n is a, c, g, or t
  misc_feature (341)..(341): n is a, c, g, or t
  misc_feature (344)..(344): n is a, c, g, or t
  misc_feature (351)..(351): n is a, c, g, or t
  misc_feature (385)..(385): n is a, c, g, or t
  misc_feature (397)..(397): n is a, c, g, or t

SEQ ID NO: 213675 - DNA, 600 bp, Canis familiaris
  misc_feature (12)..(12): n is a, c, g, or t
  misc_feature (169)..(169): n is a, c, g, or t
gcagtccccccntccctgtacccagtgactgctccacgcaggggtaggaaagcccagacctttgacttcacttctgggcctccttgaagggctgtcccmagcttcagagctccccccgggctcaactcctccctctgctttgtcctgctcccctcaacatcttttgcanggggtggttcccacgcacccatgcacacacacttacacagacacacacacacacacacacaggggagggtgagccagtgcgcagactgatgagtattagctgggaacacatgtgattgtgtatgaaagtgggcgtgtgagcctgtgtgtgaaggcagatgttggaacacatgtgagcaggattgtgttcatgtgaacgtgagtgtgtgcatatctggaaactgttcccatgcagagccctgcgggagatgacagctgcggctgcccggtttccccggcctcggcctctccctccctctcaccaactggccggtgtggtggtgacctggaggaaatgatgttgtgtgctctgtgagtgtgagggtccatgcmgccctgcaggtggccccctctcttctgcttatcctccccaggcctgactaaggagcacca

SEQ ID NO: 213676 - DNA, 434 bp, Canis familiaris; identical to SEQ ID NO: 3569
  misc_feature (203)..(203): n is a, c, g, or t
  misc_feature (404)..(404): n is a, c, g, or t

SEQ ID NO: 213677 - DNA, 600 bp, Canis familiaris
acacacacaaacaagtgaaaattagaaaatttattttgaaccttctaaaaatcttccacagatgagtgaagttgatgaacacctttcaatagcaagagagctggaaagcaaagtacctaaaaggatttgtattaagtttggggtgtttatatatgacgtccacgagaaagaccccgagggtttccaaccaaactaagacatgywttctcttgattttccaatcaaagaactgggcttactaaaagtaacaaataaaaaccactaattattcacagttgtttgaaaaatagaaaactggcctgtgagtttcaggagtttgccaacattgctgaatcaggagaggattctctatggaattcaataattaaatgtgaggacataagctttgaaaagttcttkgttatagacacaagccagcaagagaagtaaaggtgaaaccatctcagaaaatttctgaagttgtaaataacaaactatagcatcgcatcaagaaacactctttagggttttggaaatcaggattcatttctgcctaaaaagaaaaaaaggtaagaggatgtaaactgtcagaatataaacattttgagaaagatcctctag

SEQ ID NO: 213678 - DNA, 386 bp, Canis familiaris; identical to SEQ ID NO: 3571
  misc_feature (26)..(27): n is a, c, g, or t
  misc_feature (144)..(144): n is a, c, g, or t
  misc_feature (153)..(153): n is a, c, g, or t
  misc_feature (198)..(198): n is a, c, g, or t
  misc_feature (207)..(207): n is a, c, g, or t
  misc_feature (214)..(214): n is a, c, g, or t

SEQ ID NO: 213679 - DNA, 400 bp, Canis familiaris; identical to SEQ ID NO: 3572
  misc_feature (199)..(199): n is a, c, g, or t
  misc_feature (202)..(202): n is a, c, g, or t
  misc_feature (216)..(216): n is a, c, g, or t
  misc_feature (356)..(356): n is a, c, g, or t

SEQ ID NO: 213680 - DNA, 600 bp, Canis familiaris
  misc_feature (159)..(159): n is a, c, g, or t
  misc_feature (167)..(167): n is a, c, g, or t
  misc_feature (201)..(201): n is a, c, g, or t
ccaggcccaccagttgtmctgtttctactgtaaaaggcaagtgacagggtggccagaaggtcctgagcctgtgaagagctaataaactacaagagacctaatgggaacactaagaaaaatataagctgatatcctaattaacacataaacatctctgtnacactctncactctctcgtgtggcgtgtgctcttgctctatncacacacacacacacacacacacacacacacacacacacacccctataccttccttccaggatagttgctagcagaaccaaggaattttcaatataatcctatctgaggagatgcagctgccattgcccagtgtagaatggtctagggtacagaatgctccaaaatgaaaattataaactacagaaatgarctgtcatggagaaacacagatgctcttaaaaggaagagatgaggaaatggtttatgcacataaattgcacaatttccagtactccacgrgawacagctatgayggtctgcatgtatgttaataccgtaatttaaaagatacygactatacgtaaagagaaatatttagaaattgttttaaaagatgaagtttgaatgtatacaggggt

SEQ ID NO: 213681 - DNA, 470 bp, Canis familiaris; identical to SEQ ID NO: 3574
  misc_feature (424)..(424): n is a, c, g, or t

SEQ ID NO: 213682 - DNA, 415 bp, Canis familiaris; identical to SEQ ID NO: 3575
  misc_feature (147)..(147): n is a, c, g, or t
  misc_feature (152)..(152): n is a, c, g, or t
  misc_feature (200)..(200): n is a, c, g, or t
  misc_feature (204)..(205): n is a, c, g, or t

SEQ ID NO: 213683 - DNA, 398 bp, Canis familiaris; identical to SEQ ID NO: 3576
  misc_feature (306)..(306): n is a, c, g, or t
  misc_feature (308)..(309): n is a, c, g, or t

SEQ ID NO: 213684 - DNA, 410 bp, Canis familiaris; identical to SEQ ID NO: 3577
  misc_feature (284)..(284): n is a, c, g, or t
  misc_feature (348)..(348): n is a, c, g, or t

SEQ ID NO: 213685 - DNA, 470 bp, Canis familiaris; identical to SEQ ID NO: 3578
  misc_feature (59)..(59): n is a, c, g, or t
  misc_feature (75)..(76): n is a, c, g, or t
  misc_feature (112)..(112): n is a, c, g, or t

SEQ ID NO: 213686 - DNA, 436 bp, Canis familiaris; identical to SEQ ID NO: 3579
  misc_feature (29)..(29): n is a, c, g, or t
  misc_feature (279)..(279): n is a, c, g, or t

SEQ ID NO: 213687 - DNA, 202 bp, Canis familiaris; identical to SEQ ID NO: 3580
  misc_feature (81)..(81): n is a, c, g, or t
  misc_feature (88)..(88): n is a, c, g, or t
  misc_feature (153)..(153): n is a, c, g, or t
  misc_feature (158)..(158): n is a, c, g, or t
  misc_feature (181)..(181): n is a, c, g, or t
  misc_feature (188)..(188): n is a, c, g, or t
  misc_feature (190)..(190): n is a, c, g, or t
  misc_feature (196)..(196): n is a, c, g, or t
  misc_feature (198)..(198): n is a, c, g, or t

SEQ ID NO: 213688 - DNA, 215 bp, Canis familiaris; identical to SEQ ID NO: 3581
  misc_feature (75)..(75): n is a, c, g, or t
  misc_feature (146)..(146): n is a, c, g, or t
  misc_feature (148)..(148): n is a, c, g, or t
  misc_feature (153)..(153): n is a, c, g, or t
  misc_feature (155)..(155): n is a, c, g, or t
  misc_feature (158)..(158): n is a, c, g, or t
  misc_feature (160)..(161): n is a, c, g, or t
  misc_feature (170)..(170): n is a, c, g, or t
  misc_feature (186)..(186): n is a, c, g, or t
  misc_feature (210)..(210): n is a, c, g, or t

SEQ ID NO: 213689 - DNA, 366 bp, Canis familiaris; identical to SEQ ID NO: 3582

SEQ ID NO: 213690 - DNA, 208 bp, Canis familiaris; identical to SEQ ID NO: 3583
  misc_feature (194)..(194): n is a, c, g, or t

SEQ ID NO: 213691 - DNA, 374 bp, Canis familiaris; identical to SEQ ID NO: 3584
  misc_feature (31)..(31): n is a, c, g, or t
  misc_feature (237)..(237): n is a, c, g, or t
  misc_feature (239)..(239): n is a, c, g, or t
  misc_feature (258)..(258): n is a, c, g, or t

SEQ ID NO: 213692 - DNA, 447 bp, Canis familiaris; identical to SEQ ID NO: 3585

SEQ ID NO: 213693 - DNA, 403 bp, Canis familiaris; identical to SEQ ID NO: 3586
  misc_feature (8)..(8): n is a, c, g, or t
  misc_feature (22)..(22): n is a, c, g, or t
  misc_feature (128)..(128): n is a, c, g, or t

SEQ ID NO: 213694 - DNA, 230 bp, Canis familiaris; identical to SEQ ID NO: 3587
  misc_feature (150)..(150): n is a, c, g, or t
  misc_feature (165)..(166): n is a, c, g, or t
  misc_feature (187)..(187): n is a, c, g, or t

SEQ ID NO: 213695 - DNA, 600 bp, Canis familiaris
tcaccgaggcagtaatcctgccataattatctttgcctgcacacaccaaaacaaccagtatcaaacttgcaaaatgggtgtcagaagctgggaagtaaaattctaaggaaaatagtggaacacacttatttagcctcttggaactaaatagctatgggggttgtagggaaatgagaatccccacagtgcttataacattgccaaagttagggaatcaaaagctggctctctgtatgcagctgcacaacmtgagttaaagagcccagcatcaagasttctggtgcctgacaagatggaataagtgcccagacwtaattatctgcttagaaatcaccmmaacgtcagaragmtactaaaacacacacacacacacacacacacacacacacacacacacacacaacacaacacatggcttttgagacactgaatatcaggtaaaaagggcagcaatctcggagaatcaagaaacaaggtaggtgagccttagcattgtcctgacttcctactttgaaagactttcccagccgcctctcaggaggtgagaactccaagcctggaggattccctgagttgaggagaccaagctaagaatccaag

SEQ ID NO: 213696 - DNA, 213 bp, Canis familiaris; identical to SEQ ID NO: 3589
  misc_feature (26)..(26): n is a, c, g, or t
  misc_feature (90)..(90): n is a, c, g, or t
  misc_feature (150)..(150): n is a, c, g, or t
  misc_feature (205)..(205): n is a, c, g, or t

SEQ ID NO: 213697 - DNA, 390 bp, Canis familiaris; identical to SEQ ID NO: 3590
  misc_feature (30)..(30): n is a, c, g, or t
  misc_feature (266)..(266): n is a, c, g, or t

SEQ ID NO: 213698 - DNA, 358 bp, Canis familiaris; identical to SEQ ID NO: 3591
  misc_feature (215)..(215): n is a, c, g, or t
  misc_feature (292)..(293): n is a, c, g, or t
  misc_feature (317)..(317): n is a, c, g, or t
  misc_feature (323)..(323): n is a, c, g, or t

SEQ ID NO: 213699 - DNA, 370 bp, Canis familiaris; identical to SEQ ID NO: 3592
  misc_feature (235)..(235): n is a, c, g, or t
  misc_feature (291)..(291): n is a, c, g, or t
  misc_feature (295)..(295): n is a, c, g, or t
  misc_feature (305)..(305): n is a, c, g, or t
  misc_feature (345)..(345): n is a, c, g, or t
  misc_feature (351)..(351): n is a, c, g, or t

SEQ ID NO: 213700 - DNA, 519 bp, Canis familiaris; identical to SEQ ID NO: 3593

SEQ ID NO: 213701 - DNA, 384 bp, Canis familiaris; identical to SEQ ID NO: 3594
  misc_feature (120)..(120): n is a, c, g, or t
  misc_feature (147)..(147): n is a, c, g, or t
  misc_feature (154)..(154): n is a, c, g, or t
  misc_feature (159)..(159): n is a, c, g, or t
  misc_feature (184)..(184): n is a, c, g, or t
  misc_feature (242)..(242): n is a, c, g, or t
  misc_feature (249)..(249): n is a, c, g, or t
  misc_feature (274)..(274): n is a, c, g, or t
  misc_feature (311)..(311): n is a, c, g, or t
  misc_feature (353)..(353): n is a, c, g, or t

SEQ ID NO: 213702 - DNA, 372 bp, Canis familiaris; identical to SEQ ID NO: 3595
  misc_feature (245)..(245): n is a, c, g, or t
  misc_feature (251)..(251): n is a, c, g, or t
  misc_feature (262)..(262): n is a, c, g, or t
  misc_feature (265)..(265): n is a, c, g, or t
  misc_feature (272)..(272): n is a, c, g, or t
  misc_feature (290)..(290): n is a, c, g, or t
  misc_feature (297)..(297): n is a, c, g, or t
  misc_feature (346)..(346): n is a, c, g, or t
  misc_feature (360)..(360): n is a, c, g, or t

SEQ ID NO: 213703 - DNA, 217 bp, Canis familiaris; identical to SEQ ID NO: 3596
  misc_feature (20)..(20): n is a, c, g, or t
  misc_feature (156)..(156): n is a, c, g, or t
  misc_feature (176)..(176): n is a, c, g, or t
  misc_feature (184)..(184): n is a, c, g, or t
  misc_feature (192)..(192): n is a, c, g, or t

SEQ ID NO: 213704 - DNA, 376 bp, Canis familiaris; identical to SEQ ID NO: 3597
  misc_feature (316)..(316): n is a, c, g, or t

SEQ ID NO: 213705 - DNA, 439 bp, Canis familiaris; identical to SEQ ID NO: 3598
  misc_feature (25)..(25): n is a, c, g, or t
  misc_feature (252)..(252): n is a, c, g, or t
  misc_feature (288)..(288): n is a, c, g, or t
  misc_feature (321)..(321): n is a, c, g, or t
  misc_feature (369)..(369): n is a, c, g, or t

SEQ ID NO: 213706 - DNA, 375 bp, Canis familiaris; identical to SEQ ID NO: 3599

SEQ ID NO: 213707 - DNA, 171 bp, Canis familiaris; identical to SEQ ID NO: 3600
  misc_feature (50)..(50): n is a, c, g, or t
  misc_feature (116)..(116): n is a, c, g, or t
  misc_feature (160)..(160): n is a, c, g, or t

SEQ ID NO: 213708 - DNA, 440 bp, Canis familiaris; identical to SEQ ID NO: 3601
  misc_feature (217)..(217): n is a, c, g, or t
  misc_feature (220)..(221): n is a, c, g, or t
  misc_feature (340)..(340): n is a, c, g, or t
  misc_feature (362)..(362): n is a, c, g, or t
  misc_feature (408)..(408): n is a, c, g, or t

SEQ ID NO: 213709 - DNA, 430 bp, Canis familiaris; identical to SEQ ID NO: 3602
  misc_feature (30)..(30): n is a, c, g, or t
  misc_feature (162)..(162): n is a, c, g, or t
  misc_feature (336)..(336): n is a, c, g, or t

SEQ ID NO: 213710 - DNA, 460 bp, Canis familiaris; identical to SEQ ID NO: 3603
  misc_feature (123)..(123): n is a, c, g, or t
  misc_feature (292)..(292): n is a, c, g, or t
  misc_feature (331)..(331): n is a, c, g, or t
  misc_feature (397)..(397): n is a, c, g, or t
  misc_feature (427)..(427): n is a, c, g, or t
  misc_feature (434)..(434): n is a, c, g, or t

SEQ ID NO: 213711 - DNA, 447 bp, Canis familiaris; identical to SEQ ID NO: 3604
  misc_feature (39)..(39): n is a, c, g, or t
  misc_feature (209)..(209): n is a, c, g, or t
  misc_feature (236)..(236): n is a, c, g, or t

SEQ ID NO: 213712 - DNA, 422 bp, Canis familiaris; identical to SEQ ID NO: 3605
  misc_feature (230)..(230): n is a, c, g, or t
  misc_feature (359)..(359): n is a, c, g, or t

SEQ ID NO: 213713 - DNA, 360 bp, Canis familiaris; identical to SEQ ID NO: 3606
  misc_feature (275)..(275): n is a, c, g, or t

SEQ ID NO: 213714 - DNA, 426 bp, Canis familiaris; identical to SEQ ID NO: 3607
  misc_feature (119)..(119): n is a, c, g, or t
  misc_feature (143)..(143): n is a, c, g, or t
  misc_feature (152)..(152): n is a, c, g, or t
  misc_feature (332)..(332): n is a, c, g, or t

SEQ ID NO: 213715 - DNA, 334 bp, Canis familiaris; identical to SEQ ID NO: 3608

SEQ ID NO: 213716 - DNA, 387 bp, Canis familiaris; identical to SEQ ID NO: 3609
  misc_feature (176)..(176): n is a, c, g, or t
  misc_feature (181)..(181): n is a, c, g, or t
  misc_feature (186)..(186): n is a, c, g, or t
  misc_feature (225)..(225): n is a, c, g, or t
  misc_feature (264)..(264): n is a, c, g, or t

SEQ ID NO: 213717 - DNA, 387 bp, Canis familiaris; identical to SEQ ID NO: 3610

SEQ ID NO: 213718 - DNA, 600 bp, Canis familiaris
gacctcgggcttctttgaggattttattctttgtttytgattttgtgccatttgaatatcatatgcttaggggtgagtgtgtgcgtgcgtgtgtgtgtgtgtgtgtgtgtgtgtgtgtgtttcatgcktggcattctckgagctttcyawgtctggtgatwgatgtctgccaagggtttggggggaaatccacagtcattatttcttcaaaatattttctctgktcctttttctctgtcccacatattatacctttctttaattggtccacagttacttagacattctgtcctgtcctttcattcttttttctctttggatttcaatcttgaaagttttctgttgacatttcttccagctcactgattctttccttggttatgctcagtgtattgataagcccatcaaaggtactcttcatttccattgtggtgtgtttgatatccagcatttccttgtgattccttcttagagtttccatttctctgtttactttacctatagtttattttttattgaatttatattatatatgagcacatatcaaaggcacagcttggtaaatttccctgcttttgttattgtataacctatacccag

SEQ ID NO: 213719 - DNA, 345 bp, Canis familiaris; identical to SEQ ID NO: 3612

SEQ ID NO: 213720 - DNA, 440 bp, Canis familiaris; identical to SEQ ID NO: 3613
  misc_feature (105)..(105): n is a, c, g, or t
  misc_feature (146)..(146): n is a, c, g, or t

SEQ ID NO: 213721 - DNA, 600 bp, Canis familiaris
  misc_feature (378)..(378): n is a, c, g, or t
  misc_feature (416)..(416): n is a, c, g, or t
  misc_feature (422)..(422): n is a, c, g, or t
  misc_feature (506)..(507): n is a, c, g, or t
  misc_feature (517)..(517): n is a, c, g, or t
  misc_feature (529)..(529): n is a, c, g, or t
  misc_feature (555)..(555): n is a, c, g, or t
tcactaatcaagaagttaacagcaaatagaaaaatagttgattttgaactgaaggcagagttggccactaagagaattttcgaatcattctccaacttactaaaaataggctagtgaagaaaagcaattgttttatctaacttgaaacctgactgcttgagagctagtaatgaaaggttacaaagtagaatcaagttctcttccttacccggcactgaaaatctgagccttctagtcctagacatccagaagtgaccacaggcatcccagaatcatcttcttcaatcattgtgaaacaatatccatctgtgctaaagaccaaacaggcaaagtaagtgtgtgtgtgtgtgtgtgtgtgtgtgtgtgtgtgtctacgangaaaggarcatgtwtacaatgtgttttattacatacanggaganagtagatgatctttacaggttactatctgctaagagcattccaaaacatccttttatgatatgtgatgtacactataaaatatnnggtaatatcntctcagtctatntttttgttgagaaagaagaagccaangtctccatataacatatgccattaataaccatatataccaatgac

SEQ ID NO: 213722 - DNA, 305 bp, Canis familiaris; identical to SEQ ID NO: 3615
  misc_feature (27)..(27): n is a, c, g, or t

SEQ ID NO: 213723 - DNA, 380 bp, Canis familiaris; identical to SEQ ID NO: 3616

SEQ ID NO: 213724 - DNA, 380 bp, Canis familiaris; identical to SEQ ID NO: 3617
  misc_feature (62)..(62): n is a, c, g, or t

SEQ ID NO: 213725 - DNA, 395 bp, Canis familiaris; identical to SEQ ID NO: 3618
  misc_feature (267)..(267): n is a, c, g, or t
  misc_feature (370)..(370): n is a, c, g, or t

SEQ ID NO: 213726 - DNA, 600 bp, Canis familiaris
catgtcccaacctatactctatatatgtcccaacacgtatttctacactgtcccatctttcatggcataacacatggaaaacgtcaggtgaaggcactggcccaacaagagacaccattgttgggaccctggaattatctcatacacacacacacacacacacacacacacacacacacaaaaccccacacacatgtgtatgtgtttttgggggggtgggatttgataaaaggaactggagtcctacataggctaagtacataaagggatgagtcttataaaattaaaacaataactatcctcccattaagggaactgttcttttcccttctctccttggcatatattactaataatgggcatttgcttatatatcagtatatggtgctaaatgaagagggaaaaaaatgaagcaacagaagacatctatcaacagactatttctccaaataatgaaattatggaagcatactaaatatttaaacagaatgagcagtttcattcaaaactggatagcatttagcctttattctcacttatttctaagttgtgaatgatttgggggcacctgggtagctcagtggttgaatgtctgtcttt

SEQ ID NO: 213727 - DNA, 387 bp, Canis familiaris; identical to SEQ ID NO: 3620
  misc_feature (318)..(318): n is a, c, g, or t
  misc_feature (360)..(360): n is a, c, g, or t

SEQ ID NO: 213728 - DNA, 600 bp, Canis familiaris
tgtgttcaggacccaggaagacaattgcctactcatccaggtggactggcaggagaagacaggagcatagcccatgaaatccatgaggaaggttctttcacacaggcaatgtctctggattcagaagggatatgtgtgtgtgtgtgtgtgtgtgtgtgtgtgtgtgtgtctggtgcatatytctgtctgtctctctbcrgggtaaaaaagggaagtaagcccttttttatcactgccttaaatgaactttaatcatcatagagactcccagttcagctgtcacatctgctctcaatgcatgtagggatgtatttgggggaacaagagcatgtgtctttactactaacaaaagtgtacaggggctttcccttctcctcctccttcttctggctcttctttctccaaactcctcaccccttccccaccctccccccattattggcttggtaaaggaacagaaatgttgaaatcaatatgagaataaattgccacatggtctttatggtggaggcaaggtttctacagaaaatccttgtaatcagaaaagagggagtagaagattaaactgattgractgagaaagtcaaaaaaggacaactt

SEQ ID NO: 213729 - DNA, 396 bp, Canis familiaris; identical to SEQ ID NO: 3622

SEQ ID NO: 213730 - DNA, 476 bp, Canis familiaris; identical to SEQ ID NO: 3623

SEQ ID NO: 213731 - DNA, 865 bp, Canis familiaris; identical to SEQ ID NO: 3624

SEQ ID NO: 213732 - DNA, 410 bp, Canis familiaris; identical to SEQ ID NO: 3625

SEQ ID NO: 213733 - DNA, 440 bp, Canis familiaris; identical to SEQ ID NO: 3626

SEQ ID NO: 213734 - DNA, 391 bp, Canis familiaris; identical to SEQ ID NO: 3627
  misc_feature (186)..(186): n is a, c, g, or t

SEQ ID NO: 213735 - DNA, 358 bp, Canis familiaris; identical to SEQ ID NO: 3628

SEQ ID NO: 213736 - DNA, 599 bp, Canis familiaris; identical to SEQ ID NO: 3629
  misc_feature (469)..(469): n is a, c, g, or t
  misc_feature (509)..(510): n is a, c, g, or t
  misc_feature (530)..(530): n is a, c, g, or t

SEQ ID NO: 213737 - DNA, 421 bp, Canis familiaris; identical to SEQ ID NO: 3630
  misc_feature (147)..(147): n is a, c, g, or t

SEQ ID NO: 213738 - DNA, 553 bp, Canis familiaris; identical to SEQ ID NO: 3631

SEQ ID NO: 213739 - DNA, 386 bp, Canis familiaris; identical to SEQ ID NO: 3632
  misc_feature (240)..(240): n is a, c, g, or t
  misc_feature (274)..(274): n is a, c, g, or t
  misc_feature (339)..(339): n is a, c, g, or t
  misc_feature (343)..(343): n is a, c, g, or t
  misc_feature (364)..(364): n is a, c, g, or t

SEQ ID NO: 213740 - DNA, 600 bp, Canis familiaris
  misc_feature (527)..(527): n is a, c, g, or t
ccaagtatctgtgcctgttcttacatcttcatgggggcaactcttttctwaacagataactgcaatagagtgcccatcacccagttaccccatccccccatccaccactccttctgcagccctttgtttctttcagagttaggagtctctcgtggtttgtctctctaatttttcccactcagttcccctcctttcccttataacccctttcactatttcttatattccatgtatgagtgaaaccatatgattattgtccttctctgatggacttatttcattcagcataataccctccagttccatccatgtcgaatcaaagggtgggtatttgtcttttctaatggctgagtaatattccattgtgtctatgtgtatacacacacacacacacacacacacaccccacatccttatccattcatctgtcgaggacattgtggctccttccacagtttggctattgtggacattgctgctatgaccaccgggtgcagtgtcccagcatttcactacatcagtatctntggagtaaatacccaggagtgcaaatgctgggtccgtagggtaccaatcacagttttccagagtggctgtaca

SEQ ID NO: 213741 - DNA, 357 bp, Canis familiaris; identical to SEQ ID NO: 3634
  misc_feature (25)..(25): n is a, c, g, or t
  misc_feature (279)..(279): n is a, c, g, or t
  misc_feature (345)..(345): n is a, c, g, or t

SEQ ID NO: 213742 - DNA, 450 bp, Canis familiaris; identical to SEQ ID NO: 3635
  misc_feature (78)..(78): n is a, c, g, or t
  misc_feature (335)..(335): n is a, c, g, or t

SEQ ID NO: 213743 - DNA, 281 bp, Canis familiaris; identical to SEQ ID NO: 3636
  misc_feature (48)..(48): n is a, c, g, or t
  misc_feature (118)..(118): n is a, c, g, or t
  misc_feature (140)..(140): n is a, c, g, or t
  misc_feature (163)..(163): n is a, c, g, or t
  misc_feature (191)..(191): n is a, c, g, or t
  misc_feature (221)..(221): n is a, c, g, or t
  misc_feature (225)..(225): n is a, c, g, or t
  misc_feature (230)..(230): n is a, c, g, or t
  misc_feature (235)..(235): n is a, c, g, or t
  misc_feature (244)..(244): n is a, c, g, or t
  misc_feature (250)..(250): n is a, c, g, or t
  misc_feature (259)..(259): n is a, c, g, or t

SEQ ID NO: 213744 - DNA, 360 bp, Canis familiaris; identical to SEQ ID NO: 3637
  misc_feature (139)..(139): n is a, c, g, or t

SEQ ID NO: 213745 - DNA, 220 bp, Canis familiaris; identical to SEQ ID NO: 3638

SEQ ID NO: 213746 - DNA, 292 bp, Canis familiaris; identical to SEQ ID NO: 3639
  misc_feature (172)..(172): n is a, c, g, or t

SEQ ID NO: 213747 - DNA, 275 bp, Canis familiaris; identical to SEQ ID NO: 3640
  misc_feature (26)..(26): n is a, c, g, or t
  misc_feature (187)..(187): n is a, c, g, or t
  misc_feature (203)..(203): n is a, c, g, or t
  misc_feature (209)..(209): n is a, c, g, or t
  misc_feature (213)..(213): n is a, c, g, or t
  misc_feature (239)..(239): n is a, c, g, or t
  misc_feature (244)..(244): n is a, c, g, or t
  misc_feature (260)..(260): n is a, c, g, or t

SEQ ID NO: 213748 - DNA, 600 bp, Canis familiaris
  misc_feature (425)..(425): n is a, c, g, or t
  misc_feature (453)..(453): n is a, c, g, or t
  misc_feature (512)..(512): n is a, c, g, or t
atttaccagcagttaagttaccttggtcaaattgtgtaactgctctaaatttctgttttctcattagcatatctaggawaataatgctatcaataatgtctactcatagagccactgtgaattaaaggaggtaatgtattaatgtcttaggcacagggcctggcacataggaagtcttcagtcaagaatgactattatatttatctggctatdwgccacaaatacacacacacacacacacacacacacacacacatacacatgcaggcttccattatctttaktggtttaataacctaaaatcattttctcactcattattataatagcaatcattattgcaattactgtttgttcatgacacctcacattattataattattatttttatcctactctcacaaatgtcatcaataactaccanccattagttgtcattaataattactaantccatgatatcccaccccactgttctaaataaatgagtttgttttattagtactaaggnccagccataagtgaaggatttgtctccattaaaccaaaaaaatcctcagaatgttcaaggtgagtttgttttctgctctgaatttagc

SEQ ID NO: 213749 - DNA, 430 bp, Canis familiaris; identical to SEQ ID NO: 3642
  misc_feature (17)..(17): n is a, c, g, or t
  misc_feature (219)..(219): n is a, c, g, or t
  misc_feature (371)..(371): n is a, c, g, or t

SEQ ID NO: 213750 - DNA, 218 bp, Canis familiaris; identical to SEQ ID NO: 3643
  misc_feature (89)..(89): n is a, c, g, or t
  misc_feature (187)..(187): n is a, c, g, or t
  misc_feature (196)..(196): n is a, c, g, or t

SEQ ID NO: 213751 - DNA, 360 bp, Canis familiaris; identical to SEQ ID NO: 3644
  misc_feature (29)..(29): n is a, c, g, or t
  misc_feature (237)..(237): n is a, c, g, or t
  misc_feature (295)..(295): n is a, c, g, or t

SEQ ID NO: 213752 - DNA, 346 bp, Canis familiaris; identical to SEQ ID NO: 3645
  misc_feature (40)..(40): n is a, c, g, or t
  misc_feature (58)..(58): n is a, c, g, or t
  misc_feature (89)..(89): n is a, c, g, or t
  misc_feature (94)..(94): n is a, c, g, or t
  misc_feature (205)..(205): n is a, c, g, or t
  misc_feature (225)..(225): n is a, c, g, or t
  misc_feature (263)..(263): n is a, c, g, or t
  misc_feature (270)..(270): n is a, c, g, or t

SEQ ID NO: 213753 - DNA, 200 bp, Canis familiaris; identical to SEQ ID NO: 3646
  misc_feature (103)..(103): n is a, c, g, or t
  misc_feature (131)..(131): n is a, c, g, or t
  misc_feature (135)..(135): n is a, c, g, or t
  misc_feature (137)..(137): n is a, c, g, or t
  misc_feature (169)..(169): n is a, c, g, or t
  misc_feature (178)..(178): n is a, c, g, or t
  misc_feature (189)..(189): n is a, c, g, or t

SEQ ID NO: 213754 - DNA, 400 bp, Canis familiaris; identical to SEQ ID NO: 3647

SEQ ID NO: 213755 - DNA, 600 bp, Canis familiaris
  misc_feature (126)..(126): n is a, c, g, or t
  misc_feature (242)..(242): n is a, c, g, or t
  misc_feature (539)..(539): n is a, c, g, or t
  misc_feature (575)..(575): n is a, c, g, or t
ctaaacacagggtcaggaaggaaagacaaaaaagcagaaccctcagaataagtaaggaacaatatcaaaggcaaatgggttactgtaggtgctactagggtggtgatatctccaccaacgaaagancattgagcaagttctttgaggaatccaagaagtgtgacttcatytacaacttgatgcaacatagcatccaaagtgcwttggctgggtgttccagcacaattttgggataaatgganatattacttaatttgcttgtttctatactcacaggctaggggtgtgtctgtgtgtgtgtgtgtgtgtgtgccttatttcaaagagaaactattacagccaaacagaactgttccaattggaaaagttacacctacacagtggcttgtacttggagacctcagtgtgaactcatgtttaggtttatatttataggcatacagatggagagatgcagagataatggcatgtaatattaatgtattattaataataatacatatgtgtgtgcacacttgtgtgtatgtccatgcctgttncgtatgttcattgagaaagcgtggaatcactgacancccagtagcaacaagcatactttac

SEQ ID NO: 213756 - DNA, 410 bp, Canis familiaris; identical to SEQ ID NO: 3649

SEQ ID NO: 213757 - DNA, 600 bp, Canis familiaris
ttcgctcagtgccagcagcagctgttgacgcagccaggaaagcacgtccgcccctacagggcagttccactcttaataagggaaattcactttacacacactttaggggaaatgtcctgggatggagccagdgccaggtgggcactgagcttattaaaggcatgattgttagcaagaaaaacatttgcaaatatsttatgggktacttttgtatattgccatacactgtgggtgtatgcattttatccaccctccacacacacacacacacacacacatacatacagacacgcaaacctccctgaatccctttcgatyacaagattgcctttacaattgttccacaacataccttatagttaacccgtctgtagagtggatatgctgtgcctcacacctcttcatgccagggtactgtttctcactcttgttttttccctcctgccaggtgcagctcatccactataatcatgagttgtatacaaatgtcacagaagctgcaaagagccctaatggattggtggtagtttctatatttataaaagtaagtgtcttgcattcttccattattttcytgctgttcccagcccagtcagaata

SEQ ID NO: 213758 - DNA, 390 bp, Canis familiaris; identical to SEQ ID NO: 3651
  misc_feature (166)..(166): n is a, c, g, or t

SEQ ID NO: 213759 - DNA, 217 bp, Canis familiaris; identical to SEQ ID NO: 3652
  misc_feature (119)..(119): n is a, c, g, or t
  misc_feature (147)..(147): n is a, c, g, or t

SEQ ID NO: 213760 - DNA, 600 bp, Canis familiaris
aagacagatgggtgaagaaattttaggtttattaatcagctaactatatttactatttgtgaggccttccttaacattgtcccacccccaattatggttgttgttttttttaattagctgttatcttatagggtatgcacttgttttggctttaaatgcatgtatgtgtgtgtgtgtatgtgtgtgtgtgcatgtgtgtgtatgtttgggtgtctagagtgtgtccctcattgagctaattgggttttcacccttggagtaaatattaaaagcaaatttttaagttaggccagatggataccccctgggaggagtgtcacatggaaagttctgacgatggcaacatgtcataattggatgaataaggatagggaaaattggagcaatatctcatttctgaattttaggtaaaacatatgatgttgaaaaaaagataatgacttttagttcattcattgagtttagaatatatttgtaagtaaagcatggtgaaatattcacttacaaatccttaggtagcaagttcttggtattgttggaaatttaagaagaacctacaatggtattcttggtttactcccgctttttggagagggataa

SEQ ID NO: 213761 - DNA, 355 bp, Canis familiaris; identical to SEQ ID NO: 3654
  misc_feature (27)..(28): n is a, c, g, or t
  misc_feature (52)..(52): n is a, c, g, or t
  misc_feature (61)..(61): n is a, c, g, or t
  misc_feature (70)..(70): n is a, c, g, or t
  misc_feature (74)..(74): n is a, c, g, or t
  misc_feature (197)..(197): n is a, c, g, or t
  misc_feature (231)..(231): n is a, c, g, or t
  misc_feature (236)..(236): n is a, c, g, or t
  misc_feature (269)..(269): n is a, c, g, or t

SEQ ID NO: 213762 - DNA, 600 bp, Canis familiaris
  misc_feature (232)..(232): n is a, c, g, or t
  misc_feature (259)..(259): n is a, c, g, or t
  misc_feature (301)..(301): n is a, c, g, or t
  misc_feature (303)..(303): n is a, c, g, or t
  misc_feature (391)..(391): n is a, c, g, or t
gatggaagcagagttgtacaaagtctggagcacaggttctcagctcttgatgtacaatagttatctgtaaagtcttttaaaaatgtcaatggcagggcaccaaattccacagaatcagaattttgaggatggggctcaagtttctgtatttttgccacaaagcagattaaggattttttttttctggtarattgctcttccaagacaggaagtacagggtctttaggggarnaaggactatagataactttcactggtnggaatcttctcttgattttcataaacaataatacacacatancncacacacacacacacacacattctctatgatgtcatttgtctactatttcccccttttctctgtcattaaacctatgatactgtatcntaaataaattaattcattcctaatttgtaaatggcagaaacttgatttgctacccttccagagatatttaatttttaacagaaatgatgttcacatgatgaaatttccagcatcaaaatagtttgtctatttcctagacccacacatcacatttgcatgggtatttatatgtaggtaacaatggttgtgaggggccatttaatgaattg

SEQ ID NO: 213763 - DNA, 440 bp, Canis familiaris; identical to SEQ ID NO: 3656

SEQ ID NO: 213764 - DNA, 398 bp, Canis familiaris; identical to SEQ ID NO: 3657
  misc_feature (25)..(25): n is a, c, g, or t
  misc_feature (28)..(28): n is a, c, g, or t
  misc_feature (38)..(38): n is a, c, g, or t
  misc_feature (80)..(80): n is a, c, g, or t
  misc_feature (174)..(174): n is a, c, g, or t

SEQ ID NO: 213765 - DNA, 411 bp, Canis familiaris; identical to SEQ ID NO: 3658
  misc_feature (96)..(96): n is a, c, g, or t
  misc_feature (161)..(161): n is a, c, g, or t
  misc_feature (225)..(225): n is a, c, g, or t

SEQ ID NO: 213766 - DNA, 230 bp, Canis familiaris; identical to SEQ ID NO: 3659
  misc_feature (7)..(8): n is a, c, g, or t
  misc_feature (71)..(71): n is a, c, g, or t

SEQ ID NO: 213767 - DNA, 418 bp, Canis familiaris; identical to SEQ ID NO: 3660
  misc_feature (28)..(28): n is a, c, g, or t
  misc_feature (169)..(169): n is a, c, g, or t
  misc_feature (221)..(221): n is a, c, g, or t
  misc_feature (262)..(262): n is a, c, g, or t
  misc_feature (322)..(322): n is a, c, g, or t
  misc_feature (401)..(401): n is a, c, g, or t
  misc_feature (404)..(404): n is a, c, g, or t

SEQ ID NO: 213768 - DNA, 320 bp, Canis familiaris; identical to SEQ ID NO: 3661
  misc_feature (21)..(22): n is a, c, g, or t
  misc_feature (95)..(95): n is a, c, g, or t
  misc_feature (99)..(99): n is a, c, g, or t
  misc_feature (172)..(172): n is a, c, g, or t

SEQ ID NO: 213769 - DNA, 325 bp, Canis familiaris; identical to SEQ ID NO: 3662
  misc_feature (68)..(68): n is a, c, g, or t
  misc_feature (70)..(70): n is a, c, g, or t
  misc_feature (72)..(72): n is a, c, g, or t
  misc_feature (127)..(127): n is a, c, g, or t
  misc_feature (144)..(145): n is a, c, g, or t
  misc_feature (166)..(168): n is a, c, g, or t
  misc_feature (194)..(194): n is a, c, g, or t
  misc_feature (203)..(203): n is a, c, g, or t
  misc_feature (209)..(210): n is a, c, g, or t
  misc_feature (216)..(216): n is a, c, g, or t
  misc_feature (218)..(218): n is a, c, g, or t
  misc_feature (225)..(225): n is a, c, g, or t
  misc_feature (235)..(235): n is a, c, g, or t

SEQ ID NO: 213770 - DNA, 320 bp, Canis familiaris; identical to SEQ ID NO: 3663

SEQ ID NO: 213771 - DNA, 402 bp, Canis familiaris; identical to SEQ ID NO: 3664
  misc_feature (47)..(47): n is a, c, g, or t
  misc_feature (61)..(61): n is a, c, g, or t
  misc_feature (67)..(67): n is a, c, g, or t
  misc_feature (171)..(171): n is a, c, g, or t

SEQ ID NO: 213772 - DNA, 383 bp, Canis familiaris; identical to SEQ ID NO: 3665
  misc_feature (84)..(84): n is a, c, g, or t
  misc_feature (185)..(185): n is a, c, g, or t
  misc_feature (223)..(223): n is a, c, g, or t
  misc_feature (226)..(226): n is a, c, g, or t
  misc_feature (231)..(231): n is a, c, g, or t

SEQ ID NO: 213773 - DNA, 600 bp, Canis familiaris
  misc_feature (169)..(169): n is a, c, g, or t
ataaacaatcggttctacacagaaaataataaaattatgtatcatttttcaaattatatattgttggtgaaaaatgtttagaaaagcaggtacwctttcttctttaagaaaatatttwgtgatcctggagtcctgggatcgagtcccacatcaagctccctggcatggnagcctgcttctccctctgcctctctttctgtgtgtgtgatgtgtgtgtgtgtgtgwgtgtgtgtgtgtctcatskaataaataaataaaaccttttaaaaagataataaataaatttatttatttggggggtaggggctgaagtagaaggagagagagagtcttaagtagactccatgctgagtgcagagcccaacacaggtttaaatcccaagaccatgagatcacaacctaagtcaaaaccaaaagtcawacactcaactgactgtgctacccaggcaccccaaaaagcaggcatattttaaaaagtctttcaaattttagcaatttgtcagatgtggcagataacaaagctgctatttccgaaagattatttgaagttttacacgtgcttcaaattaataatgttggtgttaatgatgggtttttcaa

SEQ ID NO: 213774 - DNA, 367 bp, Canis familiaris; identical to SEQ ID NO: 3667
  misc_feature (356)..(356): n is a, c, g, or t

SEQ ID NO: 213775 - DNA, 410 bp, Canis familiaris; identical to SEQ ID NO: 3668

SEQ ID NO: 213776 - DNA, 356 bp, Canis familiaris; identical to SEQ ID NO: 3669
  misc_feature (229)..(229): n is a, c, g, or t
  misc_feature (335)..(335): n is a, c, g, or t
  misc_feature (338)..(338): n is a, c, g, or t

SEQ ID NO: 213777 - DNA, 376 bp, Canis familiaris; identical to SEQ ID NO: 3670
  misc_feature (17)..(17): n is a, c, g, or t
  misc_feature (339)..(339): n is a, c, g, or t

SEQ ID NO: 213778 - DNA, 365 bp, Canis familiaris; identical to SEQ ID NO: 3671
  misc_feature (38)..(38): n is a, c, g, or t
  misc_feature (40)..(40): n is a, c, g, or t
  misc_feature (72)..(72): n is a, c, g, or t
  misc_feature (171)..(171): n is a, c, g, or t
  misc_feature (186)..(186): n is a, c, g, or t
  misc_feature (200)..(200): n is a, c, g, or t
  misc_feature (203)..(203): n is a, c, g, or t
  misc_feature (210)..(210): n is a, c, g, or t
  misc_feature (245)..(245): n is a, c, g, or t
  misc_feature (250)..(250): n is a, c, g, or t
  misc_feature (260)..(260): n is a, c, g, or t
  misc_feature (288)..(288): n is a, c, g, or t
  misc_feature (324)..(324): n is a, c, g, or t
  misc_feature (344)..(344): n is a, c, g, or t

SEQ ID NO: 213779 - DNA, 420 bp, Canis familiaris; identical to SEQ ID NO: 3672

SEQ ID NO: 213780 - DNA, 323 bp, Canis familiaris; identical to SEQ ID NO: 3673
  misc_feature (213)..(213): n is a, c, g, or t
  misc_feature (228)..(228): n is a, c, g, or t
  misc_feature (233)..(233): n is a, c, g, or t
  misc_feature (259)..(259): n is a, c, g, or t
  misc_feature (283)..(283): n is a, c, g, or t

SEQ ID NO: 213781 - DNA, 300 bp, Canis familiaris; identical to SEQ ID NO: 3674
  misc_feature (186)..(186): n is a, c, g, or t
  misc_feature (190)..(190): n is a, c, g, or t
  misc_feature (193)..(193): n is a, c, g, or t
  misc_feature (207)..(207): n is a, c, g, or t

SEQ ID NO: 213782 - DNA, 600 bp, Canis familiaris
gakgagakagggccatcctcaagmgacakatccctccttccccctgagactttggtdtgtgatttttctccccatctagaascgctgatgtgcagagygtgctttgacctacctccttctgccmtaatcagaawctctttgtccctccawttgctctgaatttatggaagagtakgggawgtgggggmaastctgagctgcttygaccaactcgaakgtcakctkgargagtacctggtggcatttggtgtcaagatgagaatcagagagaagtatcaaagagtggctctggggagaggatggcatcatactcaccccatggccctggtcccatggtgaagtcttaatagctgaaaacaagcccagccacaggatatttcatgagataamcaaaggataaataaaaccaggtccctgtactctgcagggtcttccaggtggaggagtggtttcccccagcagggtaggcactagctgctccggggatacagaaggagatagtcatgagccccagggtggatgggtcagtagaaacttccaggggagatgactccttagcttagttctgagagattcagacacattggccggtgggaaagg

SEQ ID NO: 213783 - DNA, 461 bp, Canis familiaris; identical to SEQ ID NO: 3676

SEQ ID NO: 213784 - DNA, 335 bp, Canis familiaris; identical to SEQ ID NO: 3677
  misc_feature (68)..(68): n is a, c, g, or t
  misc_feature (138)..(138): n is a, c, g, or t
  misc_feature (157)..(157): n is a, c, g, or t
  misc_feature (275)..(275): n is a, c, g, or t

SEQ ID NO: 213785 - DNA, 363 bp, Canis familiaris; identical to SEQ ID NO: 3678
  misc_feature (58)..(58): n is a, c, g, or t
  misc_feature (86)..(86): n is a, c, g, or t
  misc_feature (100)..(100): n is a, c, g, or t
  misc_feature (218)..(218): n is a, c, g, or t
  misc_feature (268)..(268): n is a, c, g, or t
  misc_feature (312)..(312): n is a, c, g, or t
  misc_feature (316)..(316): n is a, c, g, or t
  misc_feature (340)..(340): n is a, c, g, or t

SEQ ID NO: 213786 - DNA, 406 bp, Canis familiaris; identical to SEQ ID NO: 3679
  misc_feature (275)..(275): n is a, c, g, or t
  misc_feature (306)..(306): n is a, c, g, or t
  misc_feature (337)..(337): n is a, c, g, or t
  misc_feature (352)..(352): n is a, c, g, or t
  misc_feature (362)..(362): n is a, c, g, or t
  misc_feature (370)..(370): n is a, c, g, or t
  misc_feature (374)..(374): n is a, c, g, or t
  misc_feature (397)..(397): n is a, c, g, or t

SEQ ID NO: 213787 - DNA, 519 bp, Canis familiaris; identical to SEQ ID NO: 3680
  misc_feature (30)..(30): n is a, c, g, or t
  misc_feature (221)..(221): n is a, c, g, or t
  misc_feature (421)..(421): n is a, c, g, or t

SEQ ID NO: 213788 - DNA, 305 bp, Canis familiaris; identical to SEQ ID NO: 3681
  misc_feature (169)..(169): n is a, c, g, or t
  misc_feature (182)..(182): n is a, c, g, or t
  misc_feature (198)..(198): n is a, c, g, or t
  misc_feature (213)..(213): n is a, c, g, or t
  misc_feature (223)..(223): n is a, c, g, or t
  misc_feature (235)..(235): n is a, c, g, or t

SEQ ID NO: 213789 - DNA, 580 bp, Canis familiaris; identical to SEQ ID NO: 3682
  misc_feature (132)..(132): n is a, c, g, or t

SEQ ID NO: 213790 - DNA, 477 bp, Canis familiaris; identical to SEQ ID NO: 3683

SEQ ID NO: 213791 - DNA, 226 bp, Canis familiaris; identical to SEQ ID NO: 3684
  misc_feature (176)..(176): n is a, c, g, or t

SEQ ID NO: 213792 - DNA, 564 bp, Canis familiaris; identical to SEQ ID NO: 3685
  misc_feature (113)..(113): n is a, c, g, or t
  misc_feature (138)..(138): n is a, c, g, or t
  misc_feature (187)..(187): n is a, c, g, or t
  misc_feature (425)..(425): n is a, c, g, or t
  misc_feature (431)..(431): n is a, c, g, or t
  misc_feature (449)..(449): n is a, c, g, or t
  misc_feature (467)..(467): n is a, c, g, or t
  misc_feature (494)..(494): n is a, c, g, or t

SEQ ID NO: 213793 - DNA, 600 bp, Canis familiaris
  misc_feature (525)..(525): n is a, c, g, or t
  misc_feature (541)..(541): n is a, c, g, or t
  misc_feature (572)..(572): n is a, c, g, or t
tgaggtaacagagccctgggctcccaccccattccctcttctctcttgagcctttagtggggacttggaacttgcggggaggaagggaggccaggaggggaaggcatccctagagcctgggctccaaatcttgcttcttgagatattgggaagagagcaagggcagtctaggtaggagttacccaggaggaaggaaagacagaaaacctttaaaattaaactgcagttcatttctttctatttttggttttgaacagtgctatcagggattgtttccccacattgttacacctgataagtgcctacattcatcattgtctcctctttttaacagtgatgaccttcacaccagcgggaagctttggtggacttacataggttatgtttttgtatctgacccattggggtgcatagactcctgaaaaaagcatgaccattcttcctagaaaatgcccattctctcacacacacacacacacacacacacacacacacacacacccttactcacaaactttctgtcantcacttatttacccanagttgcatataataatagagtcttacaggantgaccctctgttgaagactcctactgta

SEQ ID NO: 213794 - DNA, 255 bp, Canis familiaris; identical to SEQ ID NO: 3687
  misc_feature (208)..(208): n is a, c, g, or t
  misc_feature (218)..(218): n is a, c, g, or t

SEQ ID NO: 213795 - DNA, 567 bp, Canis familiaris; identical to SEQ ID NO: 3688
  misc_feature (437)..(437): n is a, c, g, or t

SEQ ID NO: 213796 - DNA, 355 bp, Canis familiaris; identical to SEQ ID NO: 3689
  misc_feature (330)..(330): n is a, c, g, or t

SEQ ID NO: 213797 - DNA, 437 bp, Canis familiaris; identical to SEQ ID NO: 3690
  misc_feature (407)..(407): n is a, c, g, or t

SEQ ID NO: 213798 - DNA, 215 bp, Canis familiaris; identical to SEQ ID NO: 3691

SEQ ID NO: 213799 - DNA, 465 bp, Canis familiaris; identical to SEQ ID NO: 3692
  misc_feature (30)..(30): n is a, c, g, or t

SEQ ID NO: 213800 - DNA, 600 bp, Canis familiaris
  misc_feature (204)..(204): n is a, c, g, or t
aaaatgaacatcaatgaactccaaattccctttgatgctgtcaggtttgtgtcctctctctgaaaaactgtcaattttaggattctaaataaaacaaaattcaatgactattccatcataggacaaccaactgcacttttaaggaatatgatttagcaaatttccaaaaagaggaccttggaatggcataacttcctcccatgnaaacagaacctagttgtagattgtatgtgaatgtgtgtgtatgtgtgtgtgtgtgtgtgtgtgtgtgtgaaggaaatattccttcacagaaaacagacgttttctgaaaagtacctagggatatattaatatcatttcccaggatatctcactttaagtttttggcatattcccatacattttccaaatggtcagatacccatgcttcctacaagtgcaataaccagacatactagtaggattgagataaccaagtactcaagcatttagtgaaaataaacttatccctaaacaacaaaggaaatggatttggattgtgaagatggaacaatttgtcagggccaacttatttgggagaaatgtaaactgtaaatatatttagaagctgaataattt

SEQ ID NO: 213801 - DNA, 348 bp, Canis familiaris; identical to SEQ ID NO: 3694
  misc_feature (30)..(30): n is a, c, g, or t
  misc_feature (36)..(36): n is a, c, g, or t
  misc_feature (131)..(131): n is a, c, g, or t
  misc_feature (193)..(193): n is a, c, g, or t
  misc_feature (202)..(202): n is a, c, g, or t
  misc_feature (207)..(208): n is a, c, g, or t
  misc_feature (213)..(214): n is a, c, g, or t
  misc_feature (218)..(218): n is a, c, g, or t
  misc_feature (228)..(228): n is a, c, g, or t
  misc_feature (230)..(230): n is a, c, g, or t
  misc_feature (295)..(295): n is a, c, g, or t
  misc_feature (323)..(323): n is a, c, g, or t

SEQ ID NO: 213802 - DNA, 380 bp, Canis familiaris; identical to SEQ ID NO: 3695
  misc_feature (355)..(355): n is a, c, g, or t

SEQ ID NO: 213803 - DNA, 365 bp, Canis familiaris; identical to SEQ ID NO: 3696
  misc_feature (18)..(18): n is a, c, g, or t
  misc_feature (22)..(22): n is a, c, g, or t
  misc_feature (220)..(220): n is a, c, g, or t
  misc_feature (231)..(231): n is a, c, g, or t
  misc_feature (238)..(238): n is a, c, g, or t
  misc_feature (247)..(247): n is a, c, g, or t
  misc_feature (261)..(261): n is a, c, g, or t
  misc_feature (270)..(270): n is a, c, g, or t
  misc_feature (284)..(284): n is a, c, g, or t
  misc_feature (314)..(314): n is a, c, g, or t
  misc_feature (330)..(330): n is a, c, g, or t
  misc_feature (339)..(339): n is a, c, g, or t

SEQ ID NO: 213804 - DNA, 600 bp, Canis familiaris
tagagggtgggagggggaacaagatacacgctctcactgtagccatgtccctgcatggaccagctaacttgacacagttcctagtggcagatagctttttcataccagtcacacaacaaagaaatgaaaaggatgtgacaacagggatcaaaatggagaatatagtttcccaactcctagacaaactgctctggaaaggtttgcactctgaggctgatacatcatccgsgtgtggcatggcaagcatcccagaatgtgtgtgtgtgtgtgtgtgtgtgtgtgtgtgtgtgtgtgtgtagtagagcactgctgtmacagagggtctcatctgcttgtccatctgtgaaatggggaggctgccaggattattatttccttaggtcttaatagcatcccagaaagaattggaaactaggatattggggctgatatttcagccctgggacaaaagaatcaggactcagggatgtgtggtggagcgggagttgttctcagcctttctgaaaatgcctcaggtgggcaggagcttagtctataacaggcgacttgggtgctagactctgtctggggattctggctgaatgacaggacacttgaatg

SEQ ID NO: 213805 - DNA, 431 bp, Canis familiaris; identical to SEQ ID NO: 3698
  misc_feature (391)..(391): n is a, c, g, or t

SEQ ID NO: 213806 - DNA, 390 bp, Canis familiaris; identical to SEQ ID NO: 3699

SEQ ID NO: 213807 - DNA, 280 bp, Canis familiaris; identical to SEQ ID NO: 3700
  misc_feature (52)..(52): n is a, c, g, or t

SEQ ID NO: 213808 - DNA, 400 bp, Canis familiaris; identical to SEQ ID NO: 3701
  misc_feature (178)..(178): n is a, c, g, or t

SEQ ID NO: 213809 - DNA, 490 bp, Canis familiaris; identical to SEQ ID NO: 3702

SEQ ID NO: 213810 - DNA, 319 bp, Canis familiaris; identical to SEQ ID NO: 3703

SEQ ID NO: 213811 - DNA, 600 bp, Canis familiaris
  misc_feature (93)..(93): n is a, c, g, or t
tctaagaaatgcaattttgagaagactacattgctgacttcactgccaacagtwgagtttcatgtgtcctctagacccagcttccacacattnacggccacttttccaaaaaaattagtatattattgtacatccagtgttacccaaagttctaatcacattttccatgccgagcgtttctttgaagtacgtattttccaaatgcgagcatttctttgaaatacgtattttcaaatgtcttcctataaatgccagacaaactcgggttgcactacatctgtctttacccactttttaaagattatttacttgtttgagtgagactgggagagagaacataaggaaggaggaggggtagaggaagaagcagatgccctaccaactagggagcccaacgccaggctcgatcccaggactctggggccatgacctgagctgaaggcaaacgcttaaccacccagttactgttttcagctgttctgatatgcatgttctgaactttacatggcacttgattcttatgcccaattgtattttattaagctttcctgatgagcattctaattgatcctctagagtcgacctgcaggcatgcaagct

SEQ ID NO: 213812 - DNA, 340 bp, Canis familiaris; identical to SEQ ID NO: 3705

SEQ ID NO: 213813 - DNA, 440 bp, Canis familiaris; identical to SEQ ID NO: 3706
  misc_feature (146)..(146): n is a, c, g, or t
  misc_feature (343)..(343): n is a, c, g, or t

SEQ ID NO: 213814 - DNA, 360 bp, Canis familiaris; identical to SEQ ID NO: 3707
  misc_feature (89)..(89): n is a, c, g, or t

SEQ ID NO: 213815 - DNA, 416 bp, Canis familiaris; identical to SEQ ID NO: 3708
  misc_feature (170)..(170): n is a, c, g, or t
  misc_feature (400)..(400): n is a, c, g, or t

SEQ ID NO: 213816 - DNA, 295 bp, Canis familiaris; identical to SEQ ID NO: 3709
  misc_feature (34)..(34): n is a, c, g, or t
  misc_feature (244)..(244): n is a, c, g, or t

SEQ ID NO: 213817 - DNA, 270 bp, Canis familiaris; identical to SEQ ID NO: 3710
  misc_feature (160)..(160): n is a, c, g, or t

SEQ ID NO: 213818 - DNA, 390 bp, Canis familiaris; identical to SEQ ID NO: 3711

SEQ ID NO: 213819 - DNA, 320 bp, Canis familiaris; identical to SEQ ID NO: 3712
  misc_feature (31)..(31): n is a, c, g, or t
  misc_feature (229)..(229): n is a, c, g, or t
  misc_feature (234)..(234): n is a, c, g, or t
  misc_feature (239)..(239): n is a, c, g, or t

SEQ ID NO: 213820 - DNA, 524 bp, Canis familiaris; identical to SEQ ID NO: 3713
  misc_feature (5)..(5): n is a, c, g, or t
  misc_feature (14)..(15): n is a, c, g, or t
  misc_feature (58)..(58): n is a, c, g, or t
  misc_feature (74)..(74): n is a, c, g, or t
  misc_feature (105)..(105): n is a, c, g, or t

SEQ ID NO: 213821 - DNA, 430 bp, Canis familiaris; identical to SEQ ID NO: 3714

SEQ ID NO: 213822 - DNA, 412 bp, Canis familiaris; identical to SEQ ID NO: 3715

SEQ ID NO: 213823 - DNA, 310 bp, Canis familiaris; identical to SEQ ID NO: 3716
  misc_feature (36)..(36): n is a, c, g, or t
  misc_feature (49)..(49): n is a, c, g, or t
  misc_feature (188)..(188): n is a, c, g, or t
  misc_feature (209)..(209): n is a, c, g, or t
  misc_feature (219)..(219): n is a, c, g, or t
  misc_feature (224)..(224): n is a, c, g, or t
  misc_feature (244)..(244): n is a, c, g, or t

SEQ ID NO: 213824 - DNA, 355 bp, Canis familiaris; identical to SEQ ID NO: 3717
  misc_feature (229)..(229): n is a, c, g, or t
  misc_feature (292)..(292): n is a, c, g, or t
  misc_feature (352)..(352): n is a, c, g, or t

SEQ ID NO: 213825 - DNA, 419 bp, Canis familiaris; identical to SEQ ID NO: 3718

SEQ ID NO: 213826 - DNA, 319 bp, Canis familiaris; identical to SEQ ID NO: 3719
  misc_feature (165)..(165): n is a, c, g, or t

SEQ ID NO: 213827 - DNA, 353 bp, Canis familiaris; identical to SEQ ID NO: 3720

SEQ ID NO: 213828 - DNA, 400 bp, Canis familiaris; identical to SEQ ID NO: 3721

SEQ ID NO: 213829 - DNA, 570 bp, Canis familiaris; identical to SEQ ID NO: 3722

SEQ ID NO: 213830 - DNA, 280 bp, Canis familiaris; identical to SEQ ID NO: 3723
  misc_feature (36)..(36): n is a, c, g, or t
  misc_feature (256)..(256): n is a, c, g, or t

SEQ ID NO: 213831 - DNA, 476 bp, Canis familiaris; identical to SEQ ID NO: 3724

SEQ ID NO: 213832 - DNA, 345 bp, Canis familiaris; identical to SEQ ID NO: 3725
  misc_feature (241)..(241): n is a, c, g, or t
  misc_feature (265)..(265): n is a, c, g, or t
  misc_feature (299)..(299): n is a, c, g, or t
  misc_feature (303)..(303): n is a, c, g, or t

SEQ ID NO: 213833 - DNA, 460 bp, Canis familiaris; identical to SEQ ID NO: 3726
  misc_feature (30)..(30): n is a, c, g, or t
  misc_feature (101)..(101): n is a, c, g, or t

SEQ ID NO: 213834 - DNA, 550 bp, Canis familiaris; identical to SEQ ID NO: 3727

SEQ ID NO: 213835 - DNA, 427 bp, Canis familiaris; identical to SEQ ID NO: 3728

SEQ ID NO: 213836 - DNA, 600 bp, Canis familiaris
tgagccaaaagcagatgttcaaccaactgagccacccaggcacccctgcagttaatattcttattgatacatagccatctttgtttagtgggagcttgttcaaattggctcctacgtcttttgacatgactctagtagttctttatagcttccttggttttggtatgatgaaatgtttaagattcatatcttacacttcctgctcccaaacttggattcagccatttctctaaagagcctcagttcttctaatgaaagatgacagtgactgaaatctgaggctaaaaatgctcattgctattggcaattgtttctagttcttttcactggctggagctaggaaatggtcatatatttattttagggtcacatacaccatgattttatactgataattccaattcaaattcagggctagagaatgtcactgaattttatctgccttacaagtgtctctgtttttacccatactaaaaatctcgattctcaatgacacaaatagaatactctttggctttatcccacagtatacacacacacacacacacacaccagtgttagaataataggaacaatgccaccatcaatatgattactgaa

SEQ ID NO: 213837 - DNA, 377 bp, Canis familiaris; identical to SEQ ID NO: 3730

SEQ ID NO: 213838 - DNA, 520 bp, Canis familiaris; identical to SEQ ID NO: 3731

SEQ ID NO: 213839 - DNA, 370 bp, Canis familiaris; identical to SEQ ID NO: 3732
  misc_feature (342)..(342): n is a, c, g, or t

SEQ ID NO: 213840 - DNA, 440 bp, Canis familiaris; identical to SEQ ID NO: 3733

SEQ ID NO: 213841 - DNA, 370 bp, Canis familiaris; identical to SEQ ID NO: 3734
  misc_feature (189)..(189): n is a, c, g, or t
  misc_feature (215)..(215): n is a, c, g, or t
  misc_feature (220)..(220): n is a, c, g, or t
  misc_feature (299)..(299): n is a, c, g, or t

SEQ ID NO: 213842 - DNA, 375 bp, Canis familiaris; identical to SEQ ID NO: 3735

SEQ ID NO: 213843 - DNA, 333 bp, Canis familiaris; identical to SEQ ID NO: 3736
  misc_feature (41)..(41): n is a, c, g, or t
  misc_feature (187)..(187): n is a, c, g, or t
  misc_feature (193)..(193): n is a, c, g, or t
  misc_feature (289)..(289): n is a, c, g, or t
  misc_feature (318)..(318): n is a, c, g, or t

SEQ ID NO: 213844 - DNA, 490 bp, Canis familiaris; identical to SEQ ID NO: 3737

SEQ ID NO: 213845 - DNA, 600 bp, Canis familiaris
taccaggggtggaggargagcttgggctcttctgaatgtggacttaaggttactttactatgacttaagtcacaggagattttgcagagaaggaataaaaattctccccatggctttgccccttcctctcaacacacacgtgcatgcacacacacacacacacacacacacgcatggatgcatgcacatacacattcctaccctccatcaggcattggctctgtgaccaagatattccacccagggagtcacctttggcaggggagaatgtgtgacatgggcactgctcatcatgtgccatttaaagccaaggacttttcacctcttagtaaaagtgtttctcaatcaaagtgcttattgaacttcaaactgaatggccatttaaaggctgattgcagcactcccacagtcaaagaaatgaaacttttggctttgttaatgctgagtcttggctcaaggtttgaaggctggatggaattttgccctgtacttgcaaacatttggagaactgctcagtcagccttccgggaaaaacacgcccgcgtcctactgtatgccttcagcttgggtcttgtcaacacagggatcctctagagtcga

SEQ ID NO: 213846 - DNA, 470 bp, Canis familiaris; identical to SEQ ID NO: 3739

SEQ ID NO: 213847 - DNA, 390 bp, Canis familiaris; identical to SEQ ID NO: 3740
  misc_feature (85)..(85): n is a, c, g, or t

SEQ ID NO: 213848 - DNA, 600 bp, Canis familiaris
gaatgttttacactggtatacagaaaatctataagaatacacatagtgccattggttatagacttacaatacgaaaataatgaaaatgttgttagtagtgggtggataaaggtggtgtagacatagaatgtgcaccatatgtgagttaaaagacctcaataattaaccaaaaggatactatgcaaaataaaatgtttagtaaaaattagttgaaaaatacactgaaattttggtactttcatataattttggaaaagtatacttaaaatatcacactgtgtgtgtgtgtgtgtgtgtgtgtgtgtgtgtaaaggtaaggaagagtgcaccatacatttgtaatgctggtcccaagtggccggggcagtaagtgaggttgagaataggaaggaagatagattgggaagaaaatagttgcaatatgccactaaatgaggtgtttcagtaatcaaatcaaatggatatttgtatccgtcagtttagtattagtattatttagggaaatgctactattagatagaagctagatatgagcatctaaaggaaggcccagaggcagagtcccaagtccttgagggaggaatgatgaaagccccaagc

SEQ ID NO: 213849 - DNA, 390 bp, Canis familiaris; identical to SEQ ID NO: 3742
  misc_feature (109)..(109): n is a, c, g, or t

SEQ ID NO: 213850 - DNA, 300 bp, Canis familiaris; identical to SEQ ID NO: 3743
  misc_feature (42)..(42): n is a, c, g, or t
  misc_feature (201)..(201): n is a, c, g, or t
  misc_feature (274)..(274): n is a, c, g, or t
  misc_feature (276)..(277): n is a, c, g, or t
  misc_feature (289)..(289): n is a, c, g, or t

SEQ ID NO: 213851 - DNA, 240 bp, Canis familiaris; identical to SEQ ID NO: 3744
  misc_feature (103)..(103): n is a, c, g, or t
  misc_feature (119)..(120): n is a, c, g, or t
  misc_feature (122)..(122): n is a, c, g, or t
  misc_feature (142)..(142): n is a, c, g, or t
  misc_feature (152)..(152): n is a, c, g, or t
  misc_feature (155)..(155): n is a, c, g, or t

SEQ ID NO: 213852 - DNA, 196 bp, Canis familiaris; identical to SEQ ID NO: 3745
  misc_feature (38)..(38): n is a, c, g, or t
  misc_feature (143)..(143): n is a, c, g, or t

SEQ ID NO: 213853 - DNA, 495 bp, Canis familiaris; identical to SEQ ID NO: 3746

SEQ ID NO: 213854 - DNA, 600 bp, Canis familiaris
tcttaccatgacagcagagagagctgacacagagcccagacaggtaatgccggtggtaaagctagggtccatcatgaatgggattattccacccacactagcagccagcaggcctgcattaagtgcgtgccttccaggaagcagaagcggggcggatttcaggatacctaggaccgtgcacaagtcagtcagaacctakcacatgtcattaaaccattctccctcccccgttcacatacacatacacatacacacacacacacacacacacacacacacacactcttaagtgcatgtcatttaatcctaaaataccaaactttaatataagaattttttaaaaaggtcctgaaacataaaagcaaagtagggctcttacatataacaaatattaaaagtaggaaaagaatggctcagcttaactgttctttactttgatcccacaacaatttctttactctttgtcacagaatctttaaaaattgtttttttcctgtatgaccaacacagaagttaagtgtggtttcatttaaaacttcaaaagagagtcctagtccattagcatttctgattctatcaactgagcccaagggagaagag

SEQ ID NO: 213855 - DNA, 415 bp, Canis familiaris; identical to SEQ ID NO: 3748
  misc_feature (313)..(313): n is a, c, g, or t

SEQ ID NO: 213856 - DNA, 223 bp, Canis familiaris; identical to SEQ ID NO: 3749
  misc_feature (217)..(217): n is a, c, g, or t

SEQ ID NO: 213857 - DNA, 306 bp, Canis familiaris; identical to SEQ ID NO: 3750
  misc_feature (228)..(230): n is a, c, g, or t
  misc_feature (265)..(265): n is a, c, g, or t
  misc_feature (300)..(300): n is a, c, g, or t

SEQ ID NO: 213858 - DNA, 260 bp, Canis familiaris; identical to SEQ ID NO: 3751
  misc_feature (57)..(57): n is a, c, g, or t

SEQ ID NO: 213859 - DNA, 300 bp, Canis familiaris; identical to SEQ ID NO: 3752
  misc_feature (277)..(277): n is a, c, g, or t

SEQ ID NO: 213860 - DNA, 298 bp, Canis familiaris; identical to SEQ ID NO: 3753
  misc_feature (292)..(292): n is a, c, g, or t

SEQ ID NO: 213861 - DNA, 600 bp, Canis familiaris
gctgttcctagcacagtactgcttctgaccattccacaatatctaacttagttctgagggaggcttgccttcaacacccatagctcttcaacttggcttgtgtgtgtgtgtgtgtgtgtgtgtgtgtgtgtgtgcatgcatgtgcacgtgtgtgtatatgtatgcacacatataaatawgtmtttatatttatagacatgaattactgctgtctaatatatggagagcttacttatggtaaactcccagtttcataaacaagtataaaaattgaaaagatttgaaaaaatagtcatgggattatgaaatttgacattttctcacataatatttttcttgccaagtctcctaaaaaaagtttttcctaagattttatgctatatgctgttaggttatttatgatgaagtgccactgcctagaaatgtgaaaccgtactggcactgggaagtaagcccctaggagatgaaaaagagaatagtaatgccgtcgggtgagcttattacaatggacaattgttttctcacaaacaaaactgaagtttatataagccttattaaatgcagatgccacaagtttgttggatttatttacttatttgg

SEQ ID NO: 213862 - DNA, 294 bp, Canis familiaris; identical to SEQ ID NO: 3755
  misc_feature (49)..(49): n is a, c, g, or t
  misc_feature (260)..(260): n is a, c, g, or t

SEQ ID NO: 213863 - DNA, 290 bp, Canis familiaris; identical to SEQ ID NO: 3756
  misc_feature (227)..(227): n is a, c, g, or t
  misc_feature (266)..(266): n is a, c, g, or t

SEQ ID NO: 213864 - DNA, 259 bp, Canis familiaris; identical to SEQ ID NO: 3757
  misc_feature (157)..(157): n is a, c, g, or t
  misc_feature (167)..(167): n is a, c, g, or t
  misc_feature (170)..(170): n is a, c, g, or t
  misc_feature (176)..(176): n is a, c, g, or t
  misc_feature (211)..(211): n is a, c, g, or t
  misc_feature (217)..(217): n is a, c, g, or t
  misc_feature (219)..(219): n is a, c, g, or t
  misc_feature (249)..(249): n is a, c, g, or t

SEQ ID NO: 213865 - DNA, 305 bp, Canis familiaris; identical to SEQ ID NO: 3758
  misc_feature (181)..(181): n is a, c, g, or t

SEQ ID NO: 213866 - DNA, 233 bp, Canis familiaris; identical to SEQ ID NO: 3759
  misc_feature (77)..(77): n is a, c, g, or t
  misc_feature (124)..(124): n is a, c, g, or t
  misc_feature (128)..(128): n is a, c, g, or t
  misc_feature (165)..(166): n is a, c, g, or t
  misc_feature (192)..(192): n is a, c, g, or t
  misc_feature (199)..(199): n is a, c, g, or t
  misc_feature (213)..(213): n is a, c, g, or t
  misc_feature (224)..(224): n is a, c, g, or t

SEQ ID NO: 213867 - DNA, 257 bp, Canis familiaris; identical to SEQ ID NO: 3760
  misc_feature (29)..(29): n is a, c, g, or t
  misc_feature (31)..(33): n is a, c, g, or t
  misc_feature (36)..(38): n is a, c, g, or t
  misc_feature (45)..(45): n is a, c, g, or t
  misc_feature (90)..(90): n is a, c, g, or t
  misc_feature (163)..(163): n is a, c, g, or t
  misc_feature (165)..(165): n is a, c, g, or t
  misc_feature (192)..(192): n is a, c, g, or t
  misc_feature (201)..(201): n is a, c, g, or t
  misc_feature (241)..(241): n is a, c, g, or t
  misc_feature (248)..(248): n is a, c, g, or t

SEQ ID NO: 213868 - DNA, 199 bp, Canis familiaris; identical to SEQ ID NO: 3761

SEQ ID NO: 213869 - DNA, 600 bp, Canis familiaris
tccccacaaagtctttttagatactgttttcggtatgtgtgtgtgtgtatgtgtgtgtgtgtgtgtgtatatatatatatatatatatatacawgtgccactctgcagctcccagatgggtaggcattccttcagacctgtgcctgcatcccctctaaccaccacaatacccagctgtatgtcacaccttacaaatttcttcaattcatcttcaagatggctgtggattttacttctttcccttatgttttaatmacacagcttacatcacctcaaaactatacattaactgacacaaataaaaaggctaatgcatcctttggcaatcattattatttatttcctctctacctctattgaggaaaaaacaactttctttgccaactctcttttgccaaatactttgaaaacagccctaatgatagtgaacattttgtataactttttacagcttcacacgcattttcacattcattattttattcactgtcgtaaattatcataattagtgagctaagtggtcggttggcaccagtaatacagtctcccatttctcagatgtgaaattaaaactttgaaaggtagattataaaaacgagt

SEQ ID NO: 213870 - DNA, 274 bp, Canis familiaris; identical to SEQ ID NO: 3763
  misc_feature (233)..(233): n is a, c, g, or t

SEQ ID NO: 213871 - DNA, 272 bp, Canis familiaris; identical to SEQ ID NO: 3764
  misc_feature (149)..(149): n is a, c, g, or t

SEQ ID NO: 213872 - DNA, 306 bp, Canis familiaris; identical to SEQ ID NO: 3765
  misc_feature (130)..(130): n is a, c, g, or t
  misc_feature (254)..(254): n is a, c, g, or t
  misc_feature (287)..(288): n is a, c, g, or t

SEQ ID NO: 213873 - DNA, 600 bp, Canis familiaris
actcctatgtttattgctgcattatttacaacagccaaatcatggaagcagccaagtgcccatcaacagatgaatggataaagaagatgtgatatatatatatatcayacacacacacacacacacacacacacacacacacagarggggttcaytcwatatttactctgtgacttctatatccasacaaaggaaaggatggaggtgctaaggcagtagaaagaaggtcccagatatcctagttttgtttatatatagtatgtatatagaaatattattcatccataagaaggaatgaaatyttgccatttgcmacmacatggatggaactagagagtacaatgctaagtgaaataagtcaaagagagacaaataccacatgatttcactcatgtggaatttaagaaacaaaacaaacaagcaaaggaaaaaaaaaagagataaacccaagaaacagaggggacatgagtggggtggggatgggggaagtaggggatgattaaagagtgtacttatcaagatgagcactgactaacttgtatagaattgttgaatcakgggcagcccgggkggctccagctgtttagcgtcaccttcagc

SEQ ID NO: 213874 - DNA, 600 bp, Canis familiaris
  misc_feature (53)..(53): n is a, c, g, or t
  misc_feature (175)..(175): n is a, c, g, or t
  misc_feature (337)..(337): n is a, c, g, or t
  misc_feature (488)..(488): n is a, c, g, or t
  misc_feature (530)..(530): n is a, c, g, or t
  misc_feature (534)..(534): n is a, c, g, or t
  misc_feature (544)..(544): n is a, c, g, or t
tcttctatgttcttactaattttttgtcttaatcagtttttgagatgagtttnaaaatgctataagtgaactatcttaagataaatccagtagtttcagcttttgtatatttgagaccacattgttaggcatatataatttagaattgtctatcacaaggtgaattttaactgtntataattttatagtatctcttcttatctctaaataatgattttgccttaaagtattttctccaatactaatatatctgcatcaagactgacttaataacatttattctatccttctactttggatgtttctatatctttatattttaggtatttctcttgtnacacctcttgtctagttgacaatctttgcctttcaactggagagtttagtgcacttacatttaatatgattactgatatatttggaattattgctatcacttaattatttatgtgtgtgtgtgtgtgtgtgtatgtataatactacctgtnttttcctcctttcttgactacttttggaatgatttgtttgtntgtntgttgtatgngaatgattgtttttttaatgacactttttctcaacctctgtttggaatatatactc

SEQ ID NO: 213875 - DNA, 195 bp, Canis familiaris; identical to SEQ ID NO: 3768
  misc_feature (120)..(120): n is a, c, g, or t
  misc_feature (160)..(160): n is a, c, g, or t
  misc_feature (174)..(174): n is a, c, g, or t

SEQ ID NO: 213876 - DNA, 509 bp, Canis familiaris; identical to SEQ ID NO: 3769

SEQ ID NO: 213877 - DNA, 357 bp, Canis familiaris; identical to SEQ ID NO: 3770

SEQ ID NO: 213878 - DNA, 247 bp, Canis familiaris; identical to SEQ ID NO: 3771
  misc_feature (26)..(26): n is a, c, g, or t
  misc_feature (28)..(28): n is a, c, g, or t
  misc_feature (127)..(127): n is a, c, g, or t
  misc_feature (137)..(137): n is a, c, g, or t
  misc_feature (154)..(154): n is a, c, g, or t
  misc_feature (167)..(167): n is a, c, g, or t

SEQ ID NO: 213879 - DNA, 270 bp, Canis familiaris; identical to SEQ ID NO: 3772
  misc_feature (37)..(37): n is a, c, g, or t
  misc_feature (65)..(65): n is a, c, g, or t
  misc_feature (215)..(215): n is a, c, g, or t
  misc_feature (230)..(230): n is a, c, g, or t
  misc_feature (238)..(238): n is a, c, g, or t

SEQ ID NO: 213880 - DNA, 600 bp, Canis familiaris
caagcttagtgggtttgcaagtggaacaaaagagttatgagaaacaccctgaaaataaagatagcagggatgattcaacaatgagagacaatctatgtagataccagggtctaatcttcccatacactctgtgtgtgtgtgtgtgtgtgtgtgtgtgtgtgtgtgtatggtgtgtgcaggggaagactgarsgctcgtggggaagatgtgctattgctggaacagctgtatytctaactcttccaaattgtaattgggttgtgtacaagaatttytcagagtgtgggtgggcagaaaaacatccagcttcacatcagaatgttaaccaaagaggaaccatgwacctttatatttttgtagtgtaaggaggaggcaaataccaagtcgtttcctatgtgaatagctcagaagtaccttacatttccagttccatcctagtgggatagtgggttagctgacatgggcgatggaatcagatttcctgggtcgaatcctcattctgtcacttacttggtgtttgaccttgggaagtgtccttaattactctgtgcctcaatttccttactcagtaaaattttgaataataatagaatgtatcga

SEQ ID NO: 213881 - DNA, 600 bp, Canis familiaris
ataaaaaaataatttctttaatgaagtcaattaaatctaacttagacagtttgataccttgtwtgtagccttgacgtttgctgacccccctgcaagtcatcctgttatcattggagcagatttgcaggtgttttacagactgagttatatactccattagtgagtcctgtaattaagtgttgtgaccgacattaaaaacaaaccaaaaagactagactgtagattaacatcagaaaccatcagtatgcatctcaccacagtagttgtattgttgaagaacttttgtttgttcttagtatattcatacatacataggtgctgatactgagtttggctatgcagtgtgctcttaccctggggtcttggacaaaaaggttagaaactgctgggtctgctgattaggttcctgactacatatatcaggggaagtgatgctcaggcagctagcccasgasagcatatcggtgtcttttagttacacacacacacacacacwcacacacacacacacacactctgttatcacctaaattcagaactgccgccttctttcgtctcccccttccgkgaccccacaatctgtctggactcttttcagtg

SEQ ID NO: 213882 - DNA, 228 bp, Canis familiaris; identical to SEQ ID NO: 3775
  misc_feature (38)..(38): n is a, c, g, or t
  misc_feature (191)..(191): n is a, c, g, or t
  misc_feature (193)..(193): n is a, c, g, or t
  misc_feature (197)..(197): n is a, c, g, or t

SEQ ID NO: 213883 - DNA, 293 bp, Canis familiaris; identical to SEQ ID NO: 3776
  misc_feature (108)..(108): n is a, c, g, or t
  misc_feature (111)..(111): n is a, c, g, or t
  misc_feature (123)..(123): n is a, c, g, or t
  misc_feature (187)..(187): n is a, c, g, or t
  misc_feature (217)..(217): n is a, c, g, or t
  misc_feature (225)..(225): n is a, c, g, or t
  misc_feature (231)..(231): n is a, c, g, or t

SEQ ID NO: 213884 - DNA, 567 bp, Canis familiaris; identical to SEQ ID NO: 3777
  misc_feature (309)..(309): n is a, c, g, or t

SEQ ID NO: 213885 - DNA, 575 bp, Canis familiaris; identical to SEQ ID NO: 3778
  misc_feature (84)..(84): n is a, c, g, or t

SEQ ID NO: 213886 - DNA, 380 bp, Canis familiaris; identical to SEQ ID NO: 3779
  misc_feature (15)..(15): n is a, c, g, or t
  misc_feature (234)..(234): n is a, c, g, or t

SEQ ID NO: 213887 - DNA, 397 bp, Canis familiaris; identical to SEQ ID NO: 3780
  misc_feature (75)..(75): n is a, c, g, or t
  misc_feature (278)..(278): n is a, c, g, or t
  misc_feature (288)..(288): n is a, c, g, or t
  misc_feature (299)..(299): n is a, c, g, or t
  misc_feature (315)..(316): n is a, c, g, or t
  misc_feature (369)..(369): n is a, c, g, or t

SEQ ID NO: 213888 - DNA, 600 bp, Canis familiaris
aagaaaaaggtctggaaatggatagtagtgatggttgcacaacattgtgaatgaacttaataccactgagttgtatacctaaaaatggttacaatggtaaattttatattatgtatattttctttcgattttaaaacaggagtgtgtgtgtgtgtgtgtgtgtgtgtgtaagggaatagataacacaagattggcaaaatgttaaagatttttggatgtaggtggtatatacatgaggtttattttcaattttttccttttttgtgtatgtttaaaaaaattccttaataaaaaattttaaaggcttaagagacataataagcaaatataataagtatcttatttatattttgtttttgttttttagatttcatttatttatttgacagagagagaaagagagagagagcacgcatgagcaggggaaggggcagagggagagggagaagcaggctctctgctgagcagggaggccaackcagggcttaagtccaggatcccaagaccatgagctgagtgggaaggcagatgcttaactggctaagccacccaggcacccctaatcttgacttaaaatacaaaagtaaaaaagacattttt

SEQ ID NO: 213889 - DNA, 346 bp, Canis familiaris; identical to SEQ ID NO: 3782
  misc_feature (235)..(235): n is a, c, g, or t

SEQ ID NO: 213890 - DNA, 490 bp, Canis familiaris; identical to SEQ ID NO: 3783
  misc_feature (291)..(291): n is a, c, g, or t
  misc_feature (331)..(331): n is a, c, g, or t
  misc_feature (351)..(351): n is a, c, g, or t
  misc_feature (394)..(394): n is a, c, g, or t
  misc_feature (400)..(400): n is a, c, g, or t
  misc_feature (432)..(432): n is a, c, g, or t

SEQ ID NO: 213891 - DNA, 500 bp, Canis familiaris; identical to SEQ ID NO: 3784

SEQ ID NO: 213892 - DNA, 259 bp, Canis familiaris; identical to SEQ ID NO: 3785
  misc_feature (151)..(151): n is a, c, g, or t
  misc_feature (183)..(183): n is a, c, g, or t
  misc_feature (186)..(186): n is a, c, g, or t
  misc_feature (198)..(198): n is a, c, g, or t
  misc_feature (208)..(208): n is a, c, g, or t
  misc_feature (213)..(213): n is a, c, g, or t

SEQ ID NO: 213893 - DNA, 556 bp, Canis familiaris; identical to SEQ ID NO: 3786
  misc_feature (47)..(47): n is a, c, g, or t
  misc_feature (349)..(349): n is a, c, g, or t

SEQ ID NO: 213894 - DNA, 355 bp, Canis familiaris; identical to SEQ ID NO: 3787
  misc_feature (50)..(50): n is a, c, g, or t
  misc_feature (289)..(290): n is a, c, g, or t

SEQ ID NO: 213895 - DNA, 581 bp, Canis familiaris; identical to SEQ ID NO: 3788
  misc_feature (64)..(65): n is a, c, g, or t
  misc_feature (100)..(100): n is a, c, g, or t
  misc_feature (179)..(179): n is a, c, g, or t
  misc_feature (293)..(293): n is a, c, g, or t
  misc_feature (346)..(346): n is a, c, g, or t
  misc_feature (358)..(358): n is a, c, g, or t
  misc_feature (380)..(380): n is a, c, g, or t
  misc_feature (464)..(464): n is a, c, g, or t
  misc_feature (519)..(519): n is a, c, g, or t

SEQ ID NO: 213896 - DNA, 494 bp, Canis familiaris; identical to SEQ ID NO: 3789
  misc_feature (33)..(33): n is a, c, g, or t

SEQ ID NO: 213897 - DNA, 326 bp, Canis familiaris; identical to SEQ ID NO: 3790
  misc_feature (148)..(148): n is a, c, g, or t
  misc_feature (299)..(299): n is a, c, g, or t

SEQ ID NO: 213898 - DNA, 500 bp, Canis familiaris; identical to SEQ ID NO: 3791
  misc_feature (19)..(19): n is a, c, g, or t
  misc_feature (452)..(452): n is a, c, g, or t

SEQ ID NO: 213899 - DNA, 447 bp, Canis familiaris; identical to SEQ ID NO: 3792
  misc_feature (238)..(238): n is a, c, g, or t
  misc_feature (329)..(329): n is a, c, g, or t

SEQ ID NO: 213900 - DNA, 600 bp, Canis familiaris
gtgtgcagaccctaaaccattccacccagcttaggtcctgagcctggaggcgccgtctgcctctctcaggaattcccagcgtctcttaggcgacatctggctgtgggtgaaggctactgggggcattcatttgacattctccctacacccccacttcgggcacacacacacacacacacacacastaaccttcctctaaccttttagggaaacactggtgtccttatcactccagtcgccttgstktcaagattcttaaagtatcagtcattcactacttagtataaaccacaggctgttatgctgtacgttgccgagatatgcagatgcagagtcctctcagatgggaatcatctagaatccagggtggaggtagggattaaagcctctgtgaggtccccctcactcctgtgactatgcccctttggggccctcacaatgctcagagtagcatttccaagcatctacttctsgaacctttgtgctagttccgtttccctgatgcccaccctccagatgsttccccaagccccacagccaaagtgctgacacaagacatcattggaaactcccttccatgcagcaggtagaggctggcag

SEQ ID NO: 213901 - DNA, 380 bp, Canis familiaris; identical to SEQ ID NO: 3794
  misc_feature (23)..(23): n is a, c, g, or t
  misc_feature (260)..(260): n is a, c, g, or t
  misc_feature (263)..(263): n is a, c, g, or t
  misc_feature (266)..(266): n is a, c, g, or t
  misc_feature (274)..(274): n is a, c, g, or t
  misc_feature (294)..(295): n is a, c, g, or t
  misc_feature (313)..(313): n is a, c, g, or t
  misc_feature (333)..(333): n is a, c, g, or t
  misc_feature (350)..(350): n is a, c, g, or t

SEQ ID NO: 213902 - DNA, 408 bp, Canis familiaris; identical to SEQ ID NO: 3795
  misc_feature (95)..(95): n is a, c, g, or t
  misc_feature (303)..(303): n is a, c, g, or t
  misc_feature (344)..(344): n is a, c, g, or t

SEQ ID NO: 213903 - DNA, 469 bp, Canis familiaris; identical to SEQ ID NO: 3796
  misc_feature (48)..(48): n is a, c, g, or t
  misc_feature (64)..(64): n is a, c, g, or t
  misc_feature (160)..(160): n is a, c, g, or t
  misc_feature (300)..(300): n is a, c, g, or t
  misc_feature (334)..(334): n is a, c, g, or t
  misc_feature (360)..(360): n is a, c, g, or t

SEQ ID NO: 213904 - DNA, 342 bp, Canis familiaris; identical to SEQ ID NO: 3797
  misc_feature (123)..(123): n is a, c, g, or t
  misc_feature (223)..(223): n is a, c, g, or t
  misc_feature (244)..(244): n is a, c, g, or t

SEQ ID NO: 213905 - DNA, 327 bp, Canis familiaris; identical to SEQ ID NO: 3798
  misc_feature (80)..(80): n is a, c, g, or t
  misc_feature (86)..(86): n is a, c, g, or t
  misc_feature (225)..(225): n is a, c, g, or t

SEQ ID NO: 213906 - DNA, 600 bp, Canis familiaris
gtcacaaattagatatttktacattttgtatccattaatctaataatatagctgcaattattttaatgcttttatcttttcaattctatgctacaattaaggtgaattatggtktactattacaatgttataggattcggtttttgtctatatatatttacctttgccagagagccttgtatttttacatgctttcatgttgctgcctagcatcttttctttttaagagtttatttatttattcatgacacacacacacacacacagggaggcagagacaggccgacagagaagcaggcttcatgtagggagcctgatgtggggactcgatcccgggtctccagaatcaggccccgactgaaggtggcgctaaaccgctgagcccgcggggctgctttgtctagcatcctttcatttgaattcaatcattccttttaacatttcttgtaagacaagtgtaataatgaactcagcctttgtttatctgtaaaagtctttatttctccctcattttggacaatagtttgctggatatacctgtatgaattatttatcctgattttgtaatagtttaaaaaggcaagacatacgtatagggtt

SEQ ID NO: 213907 - DNA, 300 bp, Canis familiaris; identical to SEQ ID NO: 3800
  misc_feature (194)..(194): n is a, c, g, or t
  misc_feature (208)..(208): n is a, c, g, or t

SEQ ID NO: 213908 - DNA, 744 bp, Canis familiaris; identical to SEQ ID NO: 3801

SEQ ID NO: 213909 - DNA, 429 bp, Canis familiaris; identical to SEQ ID NO: 3802
  misc_feature (139)..(139): n is a, c, g, or t
  misc_feature (311)..(311): n is a, c, g, or t

SEQ ID NO: 213910 - DNA, 220 bp, Canis familiaris; identical to SEQ ID NO: 3803
  misc_feature (25)..(25): n is a, c, g, or t
  misc_feature (41)..(41): n is a, c, g, or t
  misc_feature (48)..(48): n is a, c, g, or t
  misc_feature (62)..(62): n is a, c, g, or t
  misc_feature (78)..(78): n is a, c, g, or t
  misc_feature (98)..(98): n is a, c, g, or t
  misc_feature (110)..(110): n is a, c, g, or t
  misc_feature (113)..(113): n is a, c, g, or t
  misc_feature (169)..(169): n is a, c, g, or t

SEQ ID NO: 213911 - DNA, 310 bp, Canis familiaris; identical to SEQ ID NO: 3804
  misc_feature (37)..(37): n is a, c, g, or t

SEQ ID NO: 213912 - DNA, 375 bp, Canis familiaris; identical to SEQ ID NO: 3805

SEQ ID NO: 213913 - DNA, 600 bp, Canis familiaris
aagtttgccaagtgaggccatctaccacatgggaagacaaaccctgctttgttaatcatcaccctatgggtagagtaggccaaaagaattcttataaaagaacaggaagtacaagaggcttgtgtcttagaggaagttgcttagtacagaggaagttcttttggagcacaagagggaagaggtctgtgggtcactggagaggagaacgtgcctgtcagttagctcaggttcctaaggaagtggccagtcctcaagggagatgagtggttgggtgatgtgcctgaggacacaagctctggggttctgggtcctggcaacatwtgctgtgtctcaagcgtgtacagggcagccatcctcagagtagtgtgtgtgtgtgtgtgtgtatgtatgtgtgtgcacgtatgtgtgtatgggccagtagcatggggcttccmacgagaaatcaggttgactcacataaaatagagagagagagagagagagagagagagagatgtggtcctttttccacacccaagtaaaagcagtagctttaagcatttttctccatgacccacatcaagaaaattaaggacacctgggtagctcagtggttgagca

SEQ ID NO: 213914 - DNA, 539 bp, Canis familiaris; identical to SEQ ID NO: 3807

SEQ ID NO: 213915 - DNA, 334 bp, Canis familiaris; identical to SEQ ID NO: 3808
  misc_feature (51)..(51): n is a, c, g, or t
  misc_feature (106)..(106): n is a, c, g, or t

SEQ ID NO: 213916 - DNA, 271 bp, Canis familiaris; identical to SEQ ID NO: 3809
  misc_feature (153)..(153): n is a, c, g, or t
  misc_feature (179)..(179): n is a, c, g, or t
  misc_feature (189)..(189): n is a, c, g, or t
  misc_feature (200)..(200): n is a, c, g, or t
  misc_feature (234)..(234): n is a, c, g, or t

SEQ ID NO: 213917 - DNA, 316 bp, Canis familiaris; identical to SEQ ID NO: 3810

SEQ ID NO: 213918 - DNA, 324 bp, Canis familiaris; identical to SEQ ID NO: 3811
  misc_feature (19)..(19): n is a, c, g, or t
  misc_feature (35)..(35): n is a, c, g, or t
  misc_feature (67)..(68): n is a, c, g, or t
  misc_feature (73)..(73): n is a, c, g, or t

SEQ ID NO: 213919 - DNA, 289 bp, Canis familiaris; identical to SEQ ID NO: 3812
  misc_feature (183)..(183): n is a, c, g, or t
  misc_feature (187)..(187): n is a, c, g, or t
  misc_feature (201)..(201): n is a, c, g, or t
  misc_feature (231)..(232): n is a, c, g, or t
  misc_feature (234)..(234): n is a, c, g, or t

SEQ ID NO: 213920 - DNA, 360 bp, Canis familiaris; identical to SEQ ID NO: 3813

SEQ ID NO: 213921 - DNA, 372 bp, Canis familiaris; identical to SEQ ID NO: 3814
  misc_feature (15)..(15): n is a, c, g, or t
  misc_feature (29)..(29): n is a, c, g, or t
  misc_feature (32)..(32): n is a, c, g, or t
  misc_feature (50)..(50): n is a, c, g, or t
  misc_feature (337)..(338): n is a, c, g, or t

SEQ ID NO: 213922 - DNA, 426 bp, Canis familiaris; identical to SEQ ID NO: 3815
  misc_feature (354)..(354): n is a, c, g, or t
  misc_feature (371)..(371): n is a, c, g, or t
  misc_feature (388)..(388): n is a, c, g, or t

SEQ ID NO: 213923 - DNA, 600 bp, Canis familiaris
gcagactccatgctgagtgtggagcctgaggcagggcacaattccatgaccctgagaacatgacctgagctgaaatcaagagttggaaactcaactgactgagccaccaaggtgccccttaaccaaatctttatttatttttattttttttatacttgggaggtttattttttttggggggggggtttaaattggagttcaatttgccaacatatagcatatcacccttaaccaaatctttaaaataaatctctctctttctwtcyrcaccacacacacacatahacacacacacacacacacacacacacacacacacacacaccctgtttctgtytctctgtagaaccctaatacaccttccctggacctgctaatcaatatatatacatatatatatatggaaggcaatgtatactacatacttcttatgctaagatatgtytaaaaaatcagagaatacaaccagtttggaaattattattctctaaccaaacctcttacaatgctaaatgcaagttttatataatattcaatggaagtgggttctaccattgtaatactgaccgctgcacagtaaacaatcatagctgttgaatg

SEQ ID NO: 213924 - DNA, 440 bp, Canis familiaris; identical to SEQ ID NO: 3817
  misc_feature (23)..(23): n is a, c, g, or t
  misc_feature (29)..(29): n is a, c, g, or t
  misc_feature (55)..(55): n is a, c, g, or t
  misc_feature (66)..(66): n is a, c, g, or t

SEQ ID NO: 213925 - DNA, 600 bp, Canis familiaris
gtttagcgattttatcaggcccctgaatgaaaaatattcagtcatascaatattgcagtgtaaattgagtagagtcactttttattatatctttctgccttatcatctgcacagtaattttctagcagaggctkgatatggaaaaggctggatttagctgtacttgacacaaagcctcttcaatttcgcctaaaagttcaggctgctcttagagatgtgtgtgtgtctgtgtgtctgtgtgtgwgtgtctgtgtgtgtataatatataagccctccctcttatccaagcaatttcaggatttgaaagaataaagataaaatgcacaaacctggatgggagaagtgttgttaatataaaaatatctaatagctgtgaactcactggtaaaaaagctcctttagtgtctaagctgtggctcagttctgagcttttggcctggcwacgtggtcccacttttttmtaatcaatcaccctccaaatccaatcagcatraaaccagaccctttcatttgtcctgggagtaatagcaaagttgaagtccacakcggcccgggggggacgtgagtcgctgtggtgatggaatatgccattccagacgg

SEQ ID NO: 213926 - DNA, 366 bp, Canis familiaris; identical to SEQ ID NO: 3819

SEQ ID NO: 213927 - DNA, 329 bp, Canis familiaris; identical to SEQ ID NO: 3820
  misc_feature (213)..(213): n is a, c, g, or t

SEQ ID NO: 213928 - DNA, 575 bp, Canis familiaris; identical to SEQ ID NO: 3821

SEQ ID NO: 213929 - DNA, 456 bp, Canis familiaris; identical to SEQ ID NO: 3822
  misc_feature (224)..(224): n is a, c, g, or t
  misc_feature (337)..(337): n is a, c, g, or t

SEQ ID NO: 213930 - DNA, 290 bp, Canis familiaris; identical to SEQ ID NO: 3823
  misc_feature (12)..(12): n is a, c, g, or t
  misc_feature (182)..(182): n is a, c, g, or t
  misc_feature (213)..(213): n is a, c, g, or t
  misc_feature (234)..(234): n is a, c, g, or t
  misc_feature (242)..(242): n is a, c, g, or t
  misc_feature (253)..(253): n is a, c, g, or t

SEQ ID NO: 213931 - DNA, 430 bp, Canis familiaris; identical to SEQ ID NO: 3824
  misc_feature (225)..(225): n is a, c, g, or t

SEQ ID NO: 213932 - DNA, 331 bp, Canis familiaris; identical to SEQ ID NO: 3825
  misc_feature (173)..(173): n is a, c, g, or t
  misc_feature (176)..(176): n is a, c, g, or t
  misc_feature (182)..(183): n is a, c, g, or t
  misc_feature (187)..(187): n is a, c, g, or t
  misc_feature (199)..(199): n is a, c, g, or t
  misc_feature (209)..(209): n is a, c, g, or t
  misc_feature (217)..(217): n is a, c, g, or t
  misc_feature (222)..(222): n is a, c, g, or t
  misc_feature (249)..(249): n is a, c, g, or t
  misc_feature (285)..(285): n is a, c, g, or t

SEQ ID NO: 213933 - DNA, 503 bp, Canis familiaris; identical to SEQ ID NO: 3826
  misc_feature (444)..(444): n is a, c, g, or t
  misc_feature (473)..(473): n is a, c, g, or t

SEQ ID NO: 213934 - DNA, 270 bp, Canis familiaris; identical to SEQ ID NO: 3827
  misc_feature (30)..(30): n is a, c, g, or t
  misc_feature (53)..(54): n is a, c, g, or t
  misc_feature (62)..(62): n is a, c, g, or t
  misc_feature (109)..(109): n is a, c, g, or t
  misc_feature (123)..(124): n is a, c, g, or t
  misc_feature (177)..(177): n is a, c, g, or t
  misc_feature (220)..(220): n is a, c, g, or t
  misc_feature (228)..(228): n is a, c, g, or t
  misc_feature (235)..(235): n is a, c, g, or t
  misc_feature (237)..(237): n is a, c, g, or t

SEQ ID NO: 213935 - DNA, 196 bp, Canis familiaris; identical to SEQ ID NO: 3828
  misc_feature (9)..(9): n is a, c, g, or t

SEQ ID NO: 213936 - DNA, 331 bp, Canis familiaris; identical to SEQ ID NO: 3829
  misc_feature (15)..(15): n is a, c, g, or t
  misc_feature (43)..(43): n is a, c, g, or t
  misc_feature (52)..(53): n is a, c, g, or t
  misc_feature (299)..(300): n is a, c, g, or t

SEQ ID NO: 213937 - DNA, 440 bp, Canis familiaris; identical to SEQ ID NO: 3830
  misc_feature (39)..(39): n is a, c, g, or t
  misc_feature (52)..(52): n is a, c, g, or t

SEQ ID NO: 213938 - DNA, 250 bp, Canis familiaris; identical to SEQ ID NO: 3831
  misc_feature (103)..(103): n is a, c, g, or t
  misc_feature (115)..(115): n is a, c, g, or t
  misc_feature (193)..(193): n is a, c, g, or t

SEQ ID NO: 213939 - DNA, 248 bp, Canis familiaris; identical to SEQ ID NO: 3832
  misc_feature (35)..(36): n is a, c, g, or t
  misc_feature (48)..(48): n is a, c, g, or t
  misc_feature (50)..(50): n is a, c, g, or t
  misc_feature (62)..(62): n is a, c, g, or t
  misc_feature (79)..(79): n is a, c, g, or t
  misc_feature (82)..(82): n is a, c, g, or t
  misc_feature (115)..(115): n is a, c, g, or t
  misc_feature (191)..(191): n is a, c, g, or t

SEQ ID NO: 213940 - DNA, 226 bp, Canis familiaris; identical to SEQ ID NO: 3833
  misc_feature (20)..(20): n is a, c, g, or t
  misc_feature (78)..(78): n is a, c, g, or t
  misc_feature (87)..(87): n is a, c, g, or t
  misc_feature (91)..(91): n is a, c, g, or t
  misc_feature (113)..(114): n is a, c, g, or t
  misc_feature (128)..(128): n is a, c, g, or t

SEQ ID NO: 213941 - DNA, 268 bp, Canis familiaris; identical to SEQ ID NO: 3834
  misc_feature (265)..(265): n is a, c, g, or t

SEQ ID NO: 213942 - DNA, 490 bp, Canis familiaris; identical to SEQ ID NO: 3835
  misc_feature (362)..(362): n is a, c, g, or t
  misc_feature (413)..(413): n is a, c, g, or t
  misc_feature (431)..(431): n is a, c, g, or t

SEQ ID NO: 213943 - DNA, 350 bp, Canis familiaris; identical to SEQ ID NO: 3836
  misc_feature (50)..(50): n is a, c, g, or t
  misc_feature (123)..(123): n is a, c, g, or t
  misc_feature (182)..(182): n is a, c, g, or t
  misc_feature (193)..(193): n is a, c, g, or t
  misc_feature (199)..(199): n is a, c, g, or t
  misc_feature (209)..(209): n is a, c, g, or t
  misc_feature (224)..(224): n is a, c, g, or t
  misc_feature (227)..(227): n is a, c, g, or t
  misc_feature (231)..(231): n is a, c, g, or t
  misc_feature (241)..(241): n is a, c, g, or t
  misc_feature (245)..(245): n is a, c, g, or t
  misc_feature (252)..(252): n is a, c, g, or t
  misc_feature (259)..(260): n is a, c, g, or t
  misc_feature (266)..(266): n is a, c, g, or t
  misc_feature (310)..(310): n is a, c, g, or t
  misc_feature (325)..(325): n is a, c, g, or t
  misc_feature (346)..(346): n is a, c, g, or t

SEQ ID NO: 213944 - DNA, 379 bp, Canis familiaris; identical to SEQ ID NO: 3837
  misc_feature (33)..(33): n is a, c, g, or t
  misc_feature (185)..(185): n is a, c, g, or t
  misc_feature (190)..(190): n is a, c, g, or t
  misc_feature (202)..(202): n is a, c, g, or t
  misc_feature (205)..(205): n is a, c, g, or t
  misc_feature (229)..(230): n is a, c, g, or t
  misc_feature (250)..(250): n is a, c, g, or t
  misc_feature (256)..(257): n is a, c, g, or t
  misc_feature (280)..(280): n is a, c, g, or t
  misc_feature (284)..(284): n is a, c, g, or t
  misc_feature (294)..(294): n is a, c, g, or t
  misc_feature (321)..(321): n is a, c, g, or t
  misc_feature (346)..(346): n is a, c, g, or t

SEQ ID NO: 213945 - DNA, 340 bp, Canis familiaris; identical to SEQ ID NO: 3838
  misc_feature (116)..(116): n is a, c, g, or t
  misc_feature (257)..(257): n is a, c, g, or t
  misc_feature (284)..(284): n is a, c, g, or t

SEQ ID NO: 213946 - DNA, 384 bp, Canis familiaris; identical to SEQ ID NO: 3839
  misc_feature (49)..(49): n is a, c, g, or t
  misc_feature (51)..(51): n is a, c, g, or t
  misc_feature (133)..(133): n is a, c, g, or t

SEQ ID NO: 213947 - DNA, 405 bp, Canis familiaris; identical to SEQ ID NO: 3840
  misc_feature (41)..(41): n is a, c, g, or t
  misc_feature (278)..(278): n is a, c, g, or t
  misc_feature (283)..(283): n is a, c, g, or t
  misc_feature (294)..(294): n is a, c, g, or t
  misc_feature (298)..(298): n is a, c, g, or t
  misc_feature (302)..(302): n is a, c, g, or t
  misc_feature (305)..(305): n is a, c, g, or t
  misc_feature (310)..(310): n is a, c, g, or t
  misc_feature (315)..(315): n is a, c, g, or t
  misc_feature (318)..(318): n is a, c, g, or t
  misc_feature (342)..(342): n is a, c, g, or t
  misc_feature (348)..(348): n is a, c, g, or t
  misc_feature (363)..(363): n is a, c, g, or t
  misc_feature (365)..(365): n is a, c, g, or t

SEQ ID NO: 213948 - DNA, 371 bp, Canis familiaris; identical to SEQ ID NO: 3841
  misc_feature (39)..(40): n is a, c, g, or t
  misc_feature (174)..(174): n is a, c, g, or t
  misc_feature (178)..(178): n is a, c, g, or t
  misc_feature (190)..(190): n is a, c, g, or t
  misc_feature (204)..(204): n is a, c, g, or t
  misc_feature (218)..(218): n is a, c, g, or t
  misc_feature (227)..(227): n is a, c, g, or t
  misc_feature (231)..(231): n is a, c, g, or t
  misc_feature (238)..(238): n is a, c, g, or t
  misc_feature (271)..(271): n is a, c, g, or t
  misc_feature (275)..(276): n is a, c, g, or t
  misc_feature (281)..(281): n is a, c, g, or t
  misc_feature (287)..(287): n is a, c, g, or t
  misc_feature (296)..(296): n is a, c, g, or t
  misc_feature (298)..(298): n is a, c, g, or t
  misc_feature (300)..(300): n is a, c, g, or t
  misc_feature (303)..(303): n is a, c, g, or t
  misc_feature (314)..(314): n is a, c, g, or t
  misc_feature (322)..(322): n is a, c, g, or t
  misc_feature (325)..(326): n is a, c, g, or t
  misc_feature (328)..(328): n is a, c, g, or t
  misc_feature (330)..(331): n is a, c, g, or t
  misc_feature (340)..(340): n is a, c, g, or t
  misc_feature (345)..(345): n is a, c, g, or t

SEQ ID NO: 213949 - DNA, 430 bp, Canis familiaris; identical to SEQ ID NO: 3842
  misc_feature (224)..(224): n is a, c, g, or t
  misc_feature (229)..(229): n is a, c, g, or t
  misc_feature (235)..(235): n is a, c, g, or t

SEQ ID NO: 213950 - DNA, 374 bp, Canis familiaris; identical to SEQ ID NO: 3843
  misc_feature (102)..(102): n is a, c, g, or t
  misc_feature (107)..(107): n is a, c, g, or t
  misc_feature (231)..(231): n is a, c, g, or t
  misc_feature (260)..(260): n is a, c, g, or t
  misc_feature (307)..(308): n is a, c, g, or t

SEQ ID NO: 213951 - DNA, 254 bp, Canis familiaris; identical to SEQ ID NO: 3844
  misc_feature (13)..(13): n is a, c, g, or t
  misc_feature (24)..(24): n is a, c, g, or t
  misc_feature (196)..(196): n is a, c, g, or t
  misc_feature (208)..(208): n is a, c, g, or t

SEQ ID NO: 213952 - DNA, 227 bp, Canis familiaris; identical to SEQ ID NO: 3845
  misc_feature (26)..(26): n is a, c, g, or t
  misc_feature (106)..(107): n is a, c, g, or t
  misc_feature (114)..(115): n is a, c, g, or t
  misc_feature (122)..(122): n is a, c, g, or t
  misc_feature (131)..(131): n is a, c, g, or t
  misc_feature (160)..(160): n is a, c, g, or t

SEQ ID NO: 213953 - DNA, 353 bp, Canis familiaris; identical to SEQ ID NO: 3846
  misc_feature (37)..(37): n is a, c, g, or t
  misc_feature (76)..(76): n is a, c, g, or t
  misc_feature (234)..(234): n is a, c, g, or t
  misc_feature (252)..(252): n is a, c, g, or t
  misc_feature (257)..(257): n is a, c, g, or t
  misc_feature (303)..(303): n is a, c, g, or t
  misc_feature (306)..(306): n is a, c, g, or t
  misc_feature (341)..(341): n is a, c, g, or t

SEQ ID NO: 213954 - DNA, 510 bp, Canis familiaris; identical to SEQ ID NO: 3847
  misc_feature (444)..(444): n is a, c, g, or t
  misc_feature (449)..(449): n is a, c, g, or t
  misc_feature (452)..(452): n is a, c, g, or t

SEQ ID NO: 213955 - DNA, 299 bp, Canis familiaris; identical to SEQ ID NO: 3848
  misc_feature (145)..(145): n is a, c, g, or t
  misc_feature (147)..(148): n is a, c, g, or t
  misc_feature (172)..(172): n is a, c, g, or t
  misc_feature (242)..(243): n is a, c, g, or t

SEQ ID NO: 213956 - DNA, 393 bp, Canis familiaris; identical to SEQ ID NO: 3849
  misc_feature (62)..(62): n is a, c, g, or t
  misc_feature (304)..(304): n is a, c, g, or t
  misc_feature (307)..(307): n is a, c, g, or t
  misc_feature (310)..(310): n is a, c, g, or t
  misc_feature (351)..(351): n is a, c, g, or t

SEQ ID NO: 213957 - DNA, 370 bp, Canis familiaris; identical to SEQ ID NO: 3850
  misc_feature (25)..(25): n is a, c, g, or t
  misc_feature (43)..(43): n is a, c, g, or t
  misc_feature (69)..(69): n is a, c, g, or t
  misc_feature (101)..(102): n is a, c, g, or t
  misc_feature (104)..(105): n is a, c, g, or t
  misc_feature (112)..(112): n is a, c, g, or t
  misc_feature (119)..(119): n is a, c, g, or t
  misc_feature (121)..(121): n is a, c, g, or t
  misc_feature (129)..(129): n is a, c, g, or t
  misc_feature (133)..(133): n is a, c, g, or t
  misc_feature (151)..(151): n is a, c, g, or t
  misc_feature (160)..(160): n is a, c, g, or t
  misc_feature (183)..(183): n is a, c, g, or t
  misc_feature (189)..(189): n is a, c, g, or t
  misc_feature (204)..(204): n is a, c, g, or t
  misc_feature (236)..(236): n is a, c, g, or t
  misc_feature (295)..(295): n is a, c, g, or t
  misc_feature (325)..(325): n is a, c, g, or t
  misc_feature (329)..(329): n is a, c, g, or t

SEQ ID NO: 213958 - DNA, 250 bp, Canis familiaris; identical to SEQ ID NO: 3851
  misc_feature (3)..(3): n is a, c, g, or t
  misc_feature (33)..(33): n is a, c, g, or t
  misc_feature (36)..(36): n is a, c, g, or t
  misc_feature (46)..(47): n is a, c, g, or t
  misc_feature (93)..(93): n is a, c, g, or t
  misc_feature (112)..(112): n is a, c, g, or t
  misc_feature (133)..(133): n is a, c, g, or t
  misc_feature (140)..(140): n is a, c, g, or t
  misc_feature (160)..(160): n is a, c, g, or t
  misc_feature (184)..(184): n is a, c, g, or t
  misc_feature (189)..(189): n is a, c, g, or t
  misc_feature (211)..(211): n is a, c, g, or t

SEQ ID NO: 213959 - DNA, 420 bp, Canis familiaris; identical to SEQ ID NO: 3852
  misc_feature (291)..(291): n is a, c, g, or t
  misc_feature (300)..(300): n is a, c, g, or t
  misc_feature (317)..(317): n is a, c, g, or t
  misc_feature (373)..(373): n is a, c, g, or t

SEQ ID NO: 213960 - DNA, 365 bp, Canis familiaris; identical to SEQ ID NO: 3853
  misc_feature (288)..(288): n is a, c, g, or t
  misc_feature (293)..(293): n is a, c, g, or t

SEQ ID NO: 213961 - DNA, 388 bp, Canis familiaris; identical to SEQ ID NO: 3854
  misc_feature (214)..(214): n is a, c, g, or t
  misc_feature (220)..(220): n is a, c, g, or t
  misc_feature (222)..(222): n is a, c, g, or t
  misc_feature (225)..(225): n is a, c, g, or t
  misc_feature (249)..(249): n is a, c, g, or t
  misc_feature (296)..(296): n is a, c, g, or t
  misc_feature (306)..(306): n is a, c, g, or t

SEQ ID NO: 213962 - DNA, 440 bp, Canis familiaris; identical to SEQ ID NO: 3855

SEQ ID NO: 213963 - DNA, 600 bp, Canis familiaris
taatccattgcatagactgatagcattcagtctcctgtcctgaatagtgctaatgccttcttttctataccacaaacacctgggtaccaagataaatttacattcatgtagcaagtcctctcccaggagtacctaaatcctctgcaatttatcattagtacctgggaccaggacttgacagagacgcccctgccttctgatatccaaagctttcgctatacagaggatgttctattggtcaacaaatcagaagactctgtcaacagccttgactgtggtgttatcacaccagcatgggtggctgataaaccctaagaaaattcagggaactactcaccaaggaaagtttcttgggattaggtggatggactcacaatctttaatccctccagarattagtctgctgtctgttggtcctctccwacacacacacatacacacacacacacacacacacacacacacacaamaaagccttgaaccttaattggcactggagacattgtgccctactgtgcatctatgaacctgcaaatctgcataagactttgaatgggcctcaaatcccatcacattggaggctatccmgcaagctgtggc

SEQ ID NO: 213964 - DNA, 454 bp, Canis familiaris; identical to SEQ ID NO: 3857
  misc_feature (350)..(350): n is a, c, g, or t
  misc_feature (364)..(364): n is a, c, g, or t

SEQ ID NO: 213965 - DNA, 480 bp, Canis familiaris; identical to SEQ ID NO: 3858

SEQ ID NO: 213966 - DNA, 346 bp, Canis familiaris; identical to SEQ ID NO: 3859
  misc_feature (133)..(133): n is a, c, g, or t
  misc_feature (153)..(153): n is a, c, g, or t
  misc_feature (242)..(242): n is a, c, g, or t

SEQ ID NO: 213967 - DNA, 330 bp, Canis familiaris; identical to SEQ ID NO: 3860

SEQ ID NO: 213968 - DNA, 350 bp, Canis familiaris; identical to SEQ ID NO: 3861
  misc_feature (187)..(187): n is a, c, g, or t

SEQ ID NO: 213969 - DNA, 334 bp, Canis familiaris; identical to SEQ ID NO: 3862
  misc_feature (140)..(140): n is a, c, g, or t
  misc_feature (233)..(233): n is a, c, g, or t
  misc_feature (266)..(266): n is a, c, g, or t

SEQ ID NO: 213970 - DNA, 600 bp, Canis familiaris
tgaaagatatcctatattcaaaataaaggacagctacaggatacatgtgagttaaatgagcaggcaatccagaaatgataaacgctaatggtcaccaaacacatgaaaaaaatgctcacttgcactaataataaaatattgcaagttgaaacaatattgacatgaacattgttcaactgtgaaactggtgaagaaaagaaaaagttaacatttaatgctggaaaagggtataatgaggtcaacacattggagaggtgtaaactggtttgactggtatacaaagcaacctgatagcatgctttatcatcaaggcatgaaaatatcttgtattctccagttcttgtctcatagaggacacacacacacacacacacacacacacacacacacgatttatattttaaatctggggccaaatcctactcctctgtttcaaggcttgaactgttctctagagaaacaatggaatgtaaggagaccagttagcccgaccccagaccgcctgcgttcatatgaggacattctatgctctaacatgttcaggaaggaagaaaggaaggaggggaaagagggagactatcacccaggattcaaagtaac

SEQ ID NO: 213971 - DNA, 386 bp, Canis familiaris; identical to SEQ ID NO: 3864

SEQ ID NO: 213972 - DNA, 414 bp, Canis familiaris; identical to SEQ ID NO: 3865
  misc_feature (224)..(224): n is a, c, g, or t
  misc_feature (365)..(365): n is a, c, g, or t

SEQ ID NO: 213973 - DNA, 210 bp, Canis familiaris; identical to SEQ ID NO: 3866

SEQ ID NO: 213974 - DNA, 220 bp, Canis familiaris; identical to SEQ ID NO: 3867
  misc_feature (95)..(95): n is a, c, g, or t
  misc_feature (100)..(100): n is a, c, g, or t
  misc_feature (103)..(103): n is a, c, g, or t
  misc_feature (109)..(109): n is a, c, g, or t
  misc_feature (112)..(112): n is a, c, g, or t
  misc_feature (115)..(115): n is a, c, g, or t
  misc_feature (145)..(145): n is a, c, g, or t
  misc_feature (152)..(152): n is a, c, g, or t
  misc_feature (155)..(155): n is a, c, g, or t
  misc_feature (179)..(179): n is a, c, g, or t
  misc_feature (185)..(185): n is a, c, g, or t
  misc_feature (191)..(192): n is a, c, g, or t

SEQ ID NO: 213975 - DNA, 500 bp, Canis familiaris; identical to SEQ ID NO: 3868
  misc_feature (27)..(27): n is a, c, g, or t
  misc_feature (44)..(44): n is a, c, g, or t
  misc_feature (48)..(48): n is a, c, g, or t
  misc_feature (91)..(91): n is a, c, g, or t
  misc_feature (229)..(229): n is a, c, g, or t
  misc_feature (376)..(376): n is a, c, g, or t
  misc_feature (390)..(390): n is a, c, g, or t
  misc_feature (414)..(414): n is a, c, g, or t
  misc_feature (423)..(423): n is a, c, g, or t

SEQ ID NO: 213976 - DNA, 284 bp, Canis familiaris; identical to SEQ ID NO: 3869
  misc_feature (28)..(28): n is a, c, g, or t
  misc_feature (52)..(52): n is a, c, g, or t
  misc_feature (191)..(191): n is a, c, g, or t
  misc_feature (217)..(217): n is a, c, g, or t
  misc_feature (219)..(220): n is a, c, g, or t
  misc_feature (222)..(222): n is a, c, g, or t
  misc_feature (244)..(244): n is a, c, g, or t

SEQ ID NO: 213977 - DNA, 600 bp, Canis familiaris
  misc_feature (92)..(92): n is a, c, g, or t
aaaagacattattatcaattagttatagttgaaaaaattatgtagggttcatacaacaagttatcacttttattatattaccaactactgtntgcaaggtaaatcctgagattatgcttgagttgctaactctggaaaatgagaatagatggggacccagaaacaggtatcagagtctggatgaggatacagaatttttacatcttagttgctggcatttcaggaaattgagttagttcatttccttgagataacagagacagaggcaggattctcctaatatttattaggattcatccatgtggtgcatctaggagacacattcttgactaatgtgttaagtataaagatagccaactttaagagaaaccactatagaaaatccaaacaaaaccaataattwggraaawgtttwtttactccmaaaaaaaaaaaagagagagagagagagagagagagagagagagagaggamaggtttcagagttcttgtaaatggcttccctagtgcatttaaattaattaggtttactagaaaaacggcaaagtgtcaagagaacattattctaaataactgactcagctaaactgttaaggtggg

SEQ ID NO: 213978 - DNA, 248 bp, Canis familiaris; identical to SEQ ID NO: 3871
  misc_feature (101)..(101): n is a, c, g, or t
  misc_feature (106)..(106): n is a, c, g, or t
  misc_feature (129)..(129): n is a, c, g, or t
  misc_feature (179)..(179): n is a, c, g, or t
  misc_feature (182)..(182): n is a, c, g, or t
  misc_feature (195)..(195): n is a, c, g, or t
  misc_feature (216)..(216): n is a, c, g, or t
  misc_feature (224)..(224): n is a, c, g, or t

SEQ ID NO: 213979 - DNA, 360 bp, Canis familiaris; identical to SEQ ID NO: 3872
  misc_feature (288)..(288): n is a, c, g, or t

SEQ ID NO: 213980 - DNA, 380 bp, Canis familiaris; identical to SEQ ID NO: 3873
  misc_feature (193)..(193): n is a, c, g, or t
  misc_feature (213)..(214): n is a, c, g, or t
  misc_feature (222)..(222): n is a, c, g, or t
  misc_feature (254)..(254): n is a, c, g, or t
  misc_feature (287)..(287): n is a, c, g, or t
  misc_feature (306)..(306): n is a, c, g, or t
  misc_feature (311)..(311): n is a, c, g, or t
  misc_feature (344)..(344): n is a, c, g, or t

SEQ ID NO: 213981 - DNA, 444 bp, Canis familiaris; identical to SEQ ID NO: 3874
  misc_feature (31)..(32): n is a, c, g, or t
  misc_feature (279)..(280): n is a, c, g, or t
  misc_feature (302)..(302): n is a, c, g, or t
  misc_feature (312)..(312): n is a, c, g, or t
  misc_feature (316)..(316): n is a, c, g, or t
  misc_feature (333)..(333): n is a, c, g, or t

SEQ ID NO: 213982 - DNA, 360 bp, Canis familiaris; identical to SEQ ID NO: 3875

SEQ ID NO: 213983 - DNA, 503 bp, Canis familiaris; identical to SEQ ID NO: 3876

SEQ ID NO: 213984 - DNA, 547 bp, Canis familiaris; identical to SEQ ID NO: 3877
  misc_feature (209)..(209): n is a, c, g, or t
  misc_feature (280)..(280): n is a, c, g, or t

SEQ ID NO: 213985 - DNA, 403 bp, Canis familiaris; identical to SEQ ID NO: 3878
  misc_feature (338)..(339): n is a, c, g, or t
  misc_feature (343)..(343): n is a, c, g, or t
  misc_feature (355)..(355): n is a, c, g, or t
  misc_feature (390)..(390): n is a, c, g, or t

SEQ ID NO: 213986 - DNA, 295 bp, Canis familiaris; identical to SEQ ID NO: 3879
  misc_feature (160)..(160): n is a, c, g, or t
  misc_feature (201)..(202): n is a, c, g, or t
  misc_feature (246)..(246): n is a, c, g, or t

SEQ ID NO: 213987 - DNA, 388 bp, Canis familiaris; identical to SEQ ID NO: 3880
  misc_feature (50)..(50): n is a, c, g, or t
  misc_feature (80)..(80): n is a, c, g, or t
  misc_feature (106)..(106): n is a, c, g, or t

SEQ ID NO: 213988 - DNA, 409 bp, Canis familiaris; identical to SEQ ID NO: 3881
  misc_feature (26)..(26): n is a, c, g, or t
  misc_feature (34)..(34): n is a, c, g, or t
  misc_feature (102)..(102): n is a, c, g, or t
  misc_feature (161)..(161): n is a, c, g, or t
  misc_feature (171)..(171): n is a, c, g, or t
  misc_feature (321)..(321): n is a, c, g, or t

SEQ ID NO: 213989 - DNA, 203 bp, Canis familiaris; identical to SEQ ID NO: 3882
  misc_feature (16)..(16): n is a, c, g, or t
  misc_feature (42)..(42): n is a, c, g, or t
  misc_feature (150)..(150): n is a, c, g, or t
  misc_feature (165)..(165): n is a, c, g, or t
  misc_feature (167)..(167): n is a, c, g, or t
  misc_feature (180)..(180): n is a, c, g, or t

SEQ ID NO: 213990 - DNA, 355 bp, Canis familiaris; identical to SEQ ID NO: 3883
  misc_feature (73)..(73): n is a, c, g, or t
  misc_feature (89)..(89): n is a, c, g, or t
  misc_feature (116)..(116): n is a, c, g, or t
  misc_feature (118)..(118): n is a, c, g, or t
  misc_feature (143)..(143): n is a, c, g, or t
  misc_feature (158)..(158): n is a, c, g, or t
  misc_feature (169)..(169): n is a, c, g, or t
  misc_feature (187)..(187): n is a, c, g, or t
  misc_feature (206)..(206): n is a, c, g, or t
  misc_feature (289)..(289): n is a, c, g, or t
  misc_feature (342)..(342): n is a, c, g, or t

SEQ ID NO: 213991 - DNA, 355 bp, Canis familiaris; identical to SEQ ID NO: 3884
  misc_feature (104)..(104): n is a, c, g, or t
  misc_feature (107)..(107): n is a, c, g, or t

SEQ ID NO: 213992 - DNA, 416 bp, Canis familiaris; identical to SEQ ID NO: 3885
  misc_feature (33)..(33): n is a, c, g, or t
  misc_feature (232)..(232): n is a, c, g, or t
  misc_feature (245)..(245): n is a, c, g, or t
  misc_feature (247)..(247): n is a, c, g, or t
  misc_feature (325)..(325): n is a, c, g, or t
  misc_feature (336)..(336): n is a, c, g, or t
  misc_feature (363)..(363): n is a, c, g, or t
  misc_feature (401)..(401): n is a, c, g, or t

SEQ ID NO: 213993 - DNA, 314 bp, Canis familiaris; identical to SEQ ID NO: 3886
  misc_feature (9)..(9): n is a, c, g, or t
  misc_feature (47)..(47): n is a, c, g, or t
  misc_feature (106)..(106): n is a, c, g, or t
  misc_feature (145)..(145): n is a, c, g, or t
  misc_feature (161)..(161): n is a, c, g, or t
  misc_feature (194)..(194): n is a, c, g, or t
  misc_feature (238)..(238): n is a, c, g, or t
  misc_feature (261)..(261): n is a, c, g, or t
  misc_feature (288)..(288): n is a, c, g, or t

SEQ ID NO: 213994 - DNA, 242 bp, Canis familiaris; identical to SEQ ID NO: 3887
  misc_feature (10)..(10): n is a, c, g, or t
  misc_feature (48)..(49): n is a, c, g, or t
  misc_feature (76)..(76): n is a, c, g, or t
  misc_feature (93)..(93): n is a, c, g, or t
  misc_feature (232)..(232): n is a, c, g, or t

SEQ ID NO: 213995 - DNA, 600 bp, Canis familiaris
trtgcacaaatgtctgtgygaatctgtaggatttagtaactatacattttctaagagaatctctgkyttttttttcgtgtcycaggatgcacaggtatgtgtgcatgtgtccagcatgtgtctgagaatctgagtacgtgtctatctcaggaccactgcatatgtctgcatgtrtatctacttcaaaatttgcgtgtgctccgattcaagacwtatrtggcctccgtagtttggagacagagagagagmgwgtgwgtgwgtgtgtgtgtgtgtgtgtgtgtgttatgtgtgwgtgtcaggggtgacaggaacatttgtatacttgtgtgtgtctcttcccctggctgcwgttgcctacccagtaaaagaagagtacctattccctatctctctccctcacacccatccatgctcatgtgtgccgtgaggatggggagggggccggggwgtcggcgagctcctgtgtcacaaggttaatttctccgcagccaggcaggctgggccctgaggggagtggtgggggaggggctggtccccacagtccctctgataaatatgtatttggggytgttgtgctcaaaggtcatggggggagaagga

SEQ ID NO: 213996 - DNA, 218 bp, Canis familiaris; identical to SEQ ID NO: 3889
  misc_feature (46)..(46): n is a, c, g, or t
  misc_feature (94)..(94): n is a, c, g, or t
  misc_feature (109)..(109): n is a, c, g, or t

SEQ ID NO: 213997 - DNA, 600 bp, Canis familiaris
atgtycactggagcattatttacaatagccaagatgtggaagcagcctaaatgtccatcaacagatgaatggataaagaagatgtgatacacacacacgcacacacacacacacacacaaacacacactggactattagccataaaaaaagaatgagaccttaccatctgtgacaacatagatggaccttgagggtattatgctaagtggaataagtcagcwagacaaagacaaatagtatatgattttacttataagtaatctaaaaatcaaagaaacacachaaagaaaagwaaacttagagaaaatacagagaacggactattgtttgcctgacgggattgtggttagaagggagcaaaatgggttagggaatcaagaggtgcaaacttccagttataaaacaagtcatggggatgaagaatattaagaacagtcaataatattgtatcaactttgtatggtgtcagatggtaacagcttactgttgtggtcarttggcactgtatgcaaatattgaatctcagtgttgtacaaatgaaactaatataaatggtataccattaagaaaaattattaattaatagataaacaaagaca

SEQ ID NO: 213998 - DNA, 377 bp, Canis familiaris; identical to SEQ ID NO: 3891
  misc_feature (226)..(226): n is a, c, g, or t

SEQ ID NO: 213999 - DNA, 401 bp, Canis familiaris; identical to SEQ ID NO: 3892
  misc_feature (264)..(264): n is a, c, g, or t
  misc_feature (279)..(279): n is a, c, g, or t
  misc_feature (288)..(288): n is a, c, g, or t
  misc_feature (323)..(323): n is a, c, g, or t
  misc_feature (326)..(326): n is a, c, g, or t
  misc_feature (351)..(351): n is a, c, g, or t
  misc_feature (360)..(360): n is a, c, g, or t
  misc_feature (373)..(373): n is a, c, g, or t

SEQ ID NO: 214000 - DNA, 436 bp, Canis familiaris; identical to SEQ ID NO: 3893
  misc_feature (28)..(28): n is a, c, g, or t
  misc_feature (47)..(47): n is a, c, g, or t
  misc_feature (126)..(126): n is a, c, g, or t
  misc_feature (187)..(187): n is a, c, g, or t

SEQ ID NO: 214001 - DNA, 600 bp, Canis familiaris
ccctgctcccctgcatctcagccactggcttctctccatatacctaggagcttgtacctgcatcatcccaaactttgaactctgcttagttagcaatttttggaagctttaaacacttcttccagcaaaaggcaccacacttgctctttgacagcatcaagctagccagtctttctgtccatctgtgctcttctcagtgacccttccttcctgggtgagccagacttgcaccagtactgccaatgccatgcyccccgtccttgcaaacmtccccagccaaagacatggtgagctctctgtgccatattctcctaatctctctctctctctctctctctctctctcacacacacacacacacacacacacagacacacacacacagaggctgcttaaactatcagagaatgttctccaggcaggagtttggtgccactacaaatctatggcccacagccccaaacaatctcaagtgctgctggcagttcttctctgggtcgccaaccactttttgaattctctcagaagttatttctcaccttctctaatctccctgtgagcaccttcctaccacctgcccccactcttcacctctgttcc

SEQ ID NO: 214002 - DNA, 456 bp, Canis familiaris; identical to SEQ ID NO: 3895

SEQ ID NO: 214003 - DNA, 400 bp, Canis familiaris; identical to SEQ ID NO: 3896
  misc_feature (64)..(64): n is a, c, g, or t

SEQ ID NO: 214004 - DNA, 293 bp, Canis familiaris; identical to SEQ ID NO: 3897
  misc_feature (154)..(154): n is a, c, g, or t
  misc_feature (168)..(168): n is a, c, g, or t
  misc_feature (199)..(199): n is a, c, g, or t
  misc_feature (208)..(208): n is a, c, g, or t
  misc_feature (220)..(220): n is a, c, g, or t
  misc_feature (245)..(245): n is a, c, g, or t
  misc_feature (248)..(249): n is a, c, g, or t

SEQ ID NO: 214005 - DNA, 600 bp, Canis familiaris
gctattagctgagggtcaggaatgagtctcgcctgggaagcatgccagggagtgcagggcaatgcagggtccttcaaggaaggaggggtggaagccacttgggtggaggccctactggtaggttcctcggggtcctgtttcttggctgggagatgggataagctgttgtgagcagccccgcctcccaggcctgtcttgggctgaagcatctgtagctacaggaggcccagagctgactgactgatgtcctgtgcgcccamtgcktagccagagggtracacacacacacacacacacacacacacacacacacacacacacacacacacacagctgtgacagctggccaataggcccgaactcggggcctgtccctctgcaggagagaagccacctcctcaggcttcagaatgaggcagtgcagggctcgaaccccagggtcatccctcactagctgtgtggctttgggcaagtgctcactcgtctgggctgcagtttctctatatgaaaaaaatgggataatgccatttgctacttcacagggttgcagggtagatgaaagacctaagtcatcccctagacagagttctcctggaggct

SEQ ID NO: 214006 - DNA, 523 bp, Canis familiaris; identical to SEQ ID NO: 3899
  misc_feature (384)..(384): n is a, c, g, or t

SEQ ID NO: 214007 - DNA, 256 bp, Canis familiaris; identical to SEQ ID NO: 3900
  misc_feature (5)..(5): n is a, c, g, or t
  misc_feature (144)..(144): n is a, c, g, or t
  misc_feature (155)..(156): n is a, c, g, or t
  misc_feature (166)..(166): n is a, c, g, or t
  misc_feature (173)..(173): n is a, c, g, or t
  misc_feature (185)..(185): n is a, c, g, or t
  misc_feature (192)..(192): n is a, c, g, or t
  misc_feature (195)..(195): n is a, c, g, or t
  misc_feature (210)..(211): n is a, c, g, or t
  misc_feature (214)..(215): n is a, c, g, or t
  misc_feature (217)..(217): n is a, c, g, or t

SEQ ID NO: 214008 - DNA, 399 bp, Canis familiaris; identical to SEQ ID NO: 3901
  misc_feature (147)..(147): n is a, c, g, or t
  misc_feature (176)..(176): n is a, c, g, or t
  misc_feature (199)..(199): n is a, c, g, or t
  misc_feature (208)..(208): n is a, c, g, or t
  misc_feature (220)..(220): n is a, c, g, or t
  misc_feature (225)..(225): n is a, c, g, or t
  misc_feature (235)..(235): n is a, c, g, or t
  misc_feature (317)..(317): n is a, c, g, or t
  misc_feature (332)..(332): n is a, c, g, or t
  misc_feature (378)..(378): n is a, c, g, or t

SEQ ID NO: 214009 - DNA, 380 bp, Canis familiaris; identical to SEQ ID NO: 3902
  misc_feature (294)..(294): n is a, c, g, or t
  misc_feature (296)..(296): n is a, c, g, or t
  misc_feature (304)..(304): n is a, c, g, or t
  misc_feature (343)..(343): n is a, c, g, or t

SEQ ID NO: 214010 - DNA, 436 bp, Canis familiaris; identical to SEQ ID NO: 3903
  misc_feature (319)..(319): n is a, c, g, or t
  misc_feature (331)..(331): n is a, c, g, or t
  misc_feature (348)..(348): n is a, c, g, or t
  misc_feature (353)..(353): n is a, c, g, or t
  misc_feature (372)..(373): n is a, c, g, or t
  misc_feature (383)..(383): n is a, c, g, or t
  misc_feature (392)..(392): n is a, c, g, or t

SEQ ID NO: 214011 - DNA, 600 bp, Canis familiaris
cataatttcctagctgcaattgatatatgaaaaactacatttgattttgtgtatccagagatcagttataatacacttattaatttggacagtttatctgtagtaacttttgtattttctgcttacacaacttggcactgatgattttacttttttttgctttcttttttctaaggattttatttatttattcmtgagagacacacacacacacacacacacagagtcagagacatgggcagagggagaagcagactccctgtggggagcccaatgtaggamttgatcccagcatcccgggatcacaccctgagccaaagacagacactcaaccactgagccacccaggtgtccctactttttcttttcttatccttacaaattttgattyttttttcccccctcctgtttccctgtttytcctcatccaatgatgaggacattgggtataatgttaagtagaaatgattataacaagcattatttcctcamtcccaamttaccaggaaagcttttaatatttyttatttaactataatgtttgcagtaggttttttttttggggatcctctagagtcgacctgcaggcatgcaagcttg

SEQ ID NO: 214012 - DNA, 600 bp, Canis familiaris
ttttaattttttgaggaacgtccattttttccagtgactacatcagtttacattcccaccaatagtgcatggagttcccttttctctacatctttgccaacacttgttatttcttgcctttctgattttagtcattctgacaactgtaaggtgagatatcattgtggttttgatttacattttcctttttttaaaagattttatttatttattcatgagacacacacacacacacacacacacacacacacagaggcagagacacrggcagagttagaagcaggctccatgcagagagcccaatgtgggactcaatccggggactccaggatcatgcccttggctgaaggcagatgcccaaacgctgagccaccgaggcatcccattgatttacattttcctgatgatcagtgatattgaacatctctccatgtgtctgttagccatctgtatatctttggaaaattgtcgattcaggtcctctgcccattttttaattggttgtgttttgtttgttttagtgttgaattgtataagttctttatatattttggatattaacctcttatcagatatattatttagggggatcctctagag

SEQ ID NO: 214013 - DNA, 481 bp, Canis familiaris; identical to SEQ ID NO: 3906

SEQ ID NO: 214014 - DNA, 458 bp, Canis familiaris; identical to SEQ ID NO: 3907

SEQ ID NO: 214015 - DNA, 398 bp, Canis familiaris; identical to SEQ ID NO: 3908
  misc_feature (215)..(215): n is a, c, g, or t
  misc_feature (253)..(253): n is a, c, g, or t
  misc_feature (316)..(316): n is a, c, g, or t

SEQ ID NO: 214016 - DNA, 494 bp, Canis familiaris; identical to SEQ ID NO: 3909

SEQ ID NO: 214017 - DNA, 360 bp, Canis familiaris; identical to SEQ ID NO: 3910
  misc_feature (245)..(245): n is a, c, g, or t

SEQ ID NO: 214018 - DNA, 460 bp, Canis familiaris; identical to SEQ ID NO: 3911

SEQ ID NO: 214019 - DNA, 350 bp, Canis familiaris; identical to SEQ ID NO: 3912
  misc_feature (55)..(55): n is a, c, g, or t
  misc_feature (117)..(117): n is a, c, g, or t
  misc_feature (186)..(186): n is a, c, g, or t
  misc_feature (201)..(201): n is a, c, g, or t
  misc_feature (223)..(224): n is a, c, g, or t
  misc_feature (228)..(228): n is a, c, g, or t
  misc_feature (268)..(268): n is a, c, g, or t
  misc_feature (335)..(335): n is a, c, g, or t

SEQ ID NO: 214020 - DNA, 470 bp, Canis familiaris; identical to SEQ ID NO: 3913

SEQ ID NO: 214021 - DNA, 600 bp, Canis familiaris
tatatgtatatagagagatagatacatacatataacgtttttttattaaagatttttatttattcatttgagagagagagaacctaagtggggggaaggagcagaaggggagaaagagggacaaggagattctgtgctgaacgcggagcttgatggagttgagaagagctcwatcccaggacccaagccaaaaccacgagtttgaagcttaaccgactgagccacccagatacttmtacaaataatgttttttaatttgtataggtagagartacacacacacacacacacacacacacacagaaatctcccttaccttacaatgtggtgatgaacacaagaacccatcataaattgaaaattgaggtattgaaaataccctaaggtgcatttaatacacctaccctaatggatgccttagcttagcccagcctaccttatatgtgctcagaacactcacattagcctacagctgggaaaaatcaccaaacacaaagcctattttataatgaagtgttgagtatttcacataattgaatgctgtactgaaagtgacaatcagaatggttgtaagcttaggggtggctgactctcatgtcc

SEQ ID NO: 214022 - DNA, 420 bp, Canis familiaris; identical to SEQ ID NO: 3915
  misc_feature (117)..(117): n is a, c, g, or t
  misc_feature (153)..(153): n is a, c, g, or t
  misc_feature (180)..(180): n is a, c, g, or t
  misc_feature (185)..(185): n is a, c, g, or t

SEQ ID NO: 214023 - DNA, 391 bp, Canis familiaris; identical to SEQ ID NO: 3916
  misc_feature (268)..(268): n is a, c, g, or t
  misc_feature (294)..(294): n is a, c, g, or t

SEQ ID NO: 214024 - DNA, 387 bp, Canis familiaris; identical to SEQ ID NO: 3917
  misc_feature (165)..(165): n is a, c, g, or t
  misc_feature (170)..(170): n is a, c, g, or t
  misc_feature (178)..(178): n is a, c, g, or t
  misc_feature (204)..(204): n is a, c, g, or t
  misc_feature (215)..(216): n is a, c, g, or t
  misc_feature (222)..(222): n is a, c, g, or t
  misc_feature (235)..(235): n is a, c, g, or t
  misc_feature (238)..(238): n is a, c, g, or t
  misc_feature (241)..(241): n is a, c, g, or t
  misc_feature (243)..(243): n is a, c, g, or t
  misc_feature (253)..(253): n is a, c, g, or t
  misc_feature (258)..(258): n is a, c, g, or t
  misc_feature (264)..(264): n is a, c, g, or t
  misc_feature (320)..(320): n is a, c, g, or t
  misc_feature (328)..(328): n is a, c, g, or t

SEQ ID NO: 214025 - DNA, 600 bp, Canis familiaris
cacgaarggtarggcwatgttacastcattctagastgggccagaattcctagtttccagagcaaaatggtattttytccatcttcccagagaatactcatcaccttagtcaccaatttcaaaaggagaaattaataggtagcttgctacaggcttgaagagagaaaaagagcccatcagtcagcccccgtggtgccccaggtagagtgtgccagaagccatgggaagcagggtgtgcaaaccttgtgttttagagcagaagcagacccatctctctaaggatggggaagcccattgtgagttagtgaattttacaaatcagcaagtaagaaaaaaaatatatatgtaattaaaagaattaacagcgaatcgtggcatgtacaaggttcatctattgtggcaaggataatttaattttacttatttagggtaatatttcatagtgtgctaatgagcgagctctcatctctctggtaaaagtaatgaaatgttaggattaggagacctcagtgctgctctctgttggtcctgacagggggtgagacccccggaggttgtgctccacggccggggtgcgtgcacgtggggaatagcagtgag

SEQ ID NO: 214026 - DNA, 334 bp, Canis familiaris; identical to SEQ ID NO: 3919
  misc_feature (285)..(285): n is a, c, g, or t

SEQ ID NO: 214027 - DNA, 460 bp, Canis familiaris; identical to SEQ ID NO: 3920
  misc_feature (159)..(159): n is a, c, g, or t
  misc_feature (183)..(183): n is a, c, g, or t
  misc_feature (212)..(212): n is a, c, g, or t
  misc_feature (379)..(379): n is a, c, g, or t

SEQ ID NO: 214028 - DNA, 306 bp, Canis familiaris; identical to SEQ ID NO: 3921
  misc_feature (65)..(65): n is a, c, g, or t
  misc_feature (189)..(189): n is a, c, g, or t
  misc_feature (219)..(219): n is a, c, g, or t

SEQ ID NO: 214029 - DNA, 491 bp, Canis familiaris; identical to SEQ ID NO: 3922
  misc_feature (340)..(341): n is a, c, g, or t
  misc_feature (345)..(345): n is a, c, g, or t
  misc_feature (350)..(350): n is a, c, g, or t
  misc_feature (375)..(375): n is a, c, g, or t
  misc_feature (432)..(432): n is a, c, g, or t
  misc_feature (443)..(443): n is a, c, g, or t

SEQ ID NO: 214030 - DNA, 542 bp, Canis familiaris; identical to SEQ ID NO: 3923
  misc_feature (241)..(241): n is a, c, g, or t
  misc_feature (495)..(495): n is a, c, g, or t

SEQ ID NO: 214031 - DNA, 380 bp, Canis familiaris; identical to SEQ ID NO: 3924
  misc_feature (362)..(362): n is a, c, g, or t

SEQ ID NO: 214032 - DNA, 376 bp, Canis familiaris; identical to SEQ ID NO: 3925
  misc_feature (114)..(114): n is a, c, g, or t
  misc_feature (348)..(348): n is a, c, g, or t

SEQ ID NO: 214033 - DNA, 487 bp, Canis familiaris; identical to SEQ ID NO: 3926
  misc_feature (297)..(297): n is a, c, g, or t
  misc_feature (428)..(428): n is a, c, g, or t
  misc_feature (460)..(460): n is a, c, g, or t

SEQ ID NO: 214034 - DNA, 260 bp, Canis familiaris; identical to SEQ ID NO: 3927
  misc_feature (24)..(24): n is a, c, g, or t
  misc_feature (33)..(33): n is a, c, g, or t
  misc_feature (37)..(37): n is a, c, g, or t
  misc_feature (41)..(41): n is a, c, g, or t
  misc_feature (52)..(52): n is a, c, g, or t
  misc_feature (72)..(72): n is a, c, g, or t
  misc_feature (109)..(109): n is a, c, g, or t

SEQ ID NO: 214035 - DNA, 530 bp, Canis familiaris; identical to SEQ ID NO: 3928
  misc_feature (77)..(77): n is a, c, g, or t
  misc_feature (104)..(104): n is a, c, g, or t

SEQ ID NO: 214036 - DNA, 210 bp, Canis familiaris; identical to SEQ ID NO: 3929

SEQ ID NO: 214037 - DNA, 500 bp, Canis familiaris; identical to SEQ ID NO: 3930
  misc_feature (9)..(9): n is a, c, g, or t
  misc_feature (12)..(12): n is a, c, g, or t
  misc_feature (92)..(92): n is a, c, g, or t
  misc_feature (105)..(105): n is a, c, g, or t
  misc_feature (149)..(149): n is a, c, g, or t
  misc_feature (184)..(184): n is a, c, g, or t
  misc_feature (212)..(212): n is a, c, g, or t
  misc_feature (281)..(281): n is a, c, g, or t
  misc_feature (333)..(333): n is a, c, g, or t
  misc_feature (352)..(352): n is a, c, g, or t
  misc_feature (367)..(367): n is a, c, g, or t
  misc_feature (373)..(373): n is a, c, g, or t
  misc_feature (386)..(386): n is a, c, g, or t
  misc_feature (408)..(408): n is a, c, g, or t
  misc_feature (420)..(420): n is a, c, g, or t
  misc_feature (457)..(457): n is a, c, g, or t

SEQ ID NO: 214038 - DNA, 561 bp, Canis familiaris; identical to SEQ ID NO: 3931

SEQ ID NO: 214039 - DNA, 390 bp, Canis familiaris; identical to SEQ ID NO: 3932
  misc_feature (63)..(63): n is a, c, g, or t
  misc_feature (74)..(74): n is a, c, g, or t
  misc_feature (83)..(83): n is a, c, g, or t
  misc_feature (207)..(207): n is a, c, g, or t

SEQ ID NO: 214040 - DNA, 470 bp, Canis familiaris; identical to SEQ ID NO: 3933
  misc_feature (61)..(61): n is a, c, g, or t
  misc_feature (107)..(107): n is a, c, g, or t

SEQ ID NO: 214041 - DNA, 232 bp, Canis familiaris; identical to SEQ ID NO: 3934
  misc_feature (9)..(10): n is a, c, g, or t
  misc_feature (216)..(216): n is a, c, g, or t

SEQ ID NO: 214042 - DNA, 385 bp, Canis familiaris; identical to SEQ ID NO: 3935
  misc_feature (12)..(12): n is a, c, g, or t
  misc_feature (40)..(40): n is a, c, g, or t
  misc_feature (55)..(57): n is a, c, g, or t
  misc_feature (71)..(71): n is a, c, g, or t
  misc_feature (77)..(77): n is a, c, g, or t
  misc_feature (84)..(84): n is a, c, g, or t
  misc_feature (93)..(93): n is a, c, g, or t
  misc_feature (97)..(97): n is a, c, g, or t
  misc_feature (105)..(105): n is a, c, g, or t
  misc_feature (121)..(121): n is a, c, g, or t
  misc_feature (128)..(128): n is a, c, g, or t
  misc_feature (309)..(309): n is a, c, g, or t

SEQ ID NO: 214043 - DNA, 283 bp, Canis familiaris; identical to SEQ ID NO: 3936
  misc_feature (180)..(180): n is a, c, g, or t
  misc_feature (184)..(184): n is a, c, g, or t
  misc_feature (192)..(193): n is a, c, g, or t
  misc_feature (207)..(207): n is a, c, g, or t
  misc_feature (237)..(237): n is a, c, g, or t
  misc_feature (240)..(241): n is a, c, g, or t

SEQ ID NO: 214044 - DNA, 400 bp, Canis familiaris; identical to SEQ ID NO: 3937
  misc_feature (179)..(179): n is a, c, g, or t
  misc_feature (372)..(372): n is a, c, g, or t
  misc_feature (375)..(375): n is a, c, g, or t

SEQ ID NO: 214045 - DNA, 600 bp, Canis familiaris
  misc_feature (59)..(59): n is a, c, g, or t
  misc_feature (177)..(177): n is a, c, g, or t
  misc_feature (503)..(503): n is a, c, g, or t
aatggaatatttagagaatccagaaacaggcccacacttacacagcaatctatgacaanggaaggaaacaacccaatgggaaaaagaccacctcttccataaatggtgctgggaaaactggacagctacatgcaaaagaataaaaccagactacttttttatactacacaaattcanaatagattaaagacctaagtgtaaaatcttaagccagaaatctcctaaaagaaaatataggcagtaatctcttagatttcaaccttaatatttttctggatatgcctccccaagcaatggaaacaaaagcaaaaacaaagaattgagactacaacaaactaaaaagcatttgacaagcaaaggaagccattcaaccaaaaagcaacttaccttgcaaatgatttaccttgcaaatgattcatccttagcatccaatacagagttaatatccaaaatatacaaaaatacagacaactcaacaccaaacacacacacacacacaccanattgaaaaatgagaagacctatattagacatttttccagaaaagaattcagatggtcgatagacatatgaaaagacaattatcatcatattattagg

SEQ ID NO: 214046 - DNA, 600 bp, Canis familiaris
  misc_feature (225)..(225): n is a, c, g, or t
gaagattgatgaaactgtattaaggaatcacattttgtttcttggatgaaagatgttttgtaaatgcaatgaatcaaaacgttattatttcaagttgtatgacattatggagtatctgtggagaaaccttgccttggcattgtttggttatttctatttttacaatagttgtaactgttaaattgggagtcatctgtgggaatacaagggtctaaatatttcccnaggataaaaaagtatgtgtgtaatgtgtgtgtgtgtgygtgtgtgtgtaagagagacagactgaggaggcttgaaccctagtttccttgataaattattcccacagggctatagttgctgtgaggattaaatcaggataataagtaatagcatttagcaccatgcctagcacatggtatcatccagtaaatgatagctgctattattattttcttaactggattgattttggcagtttattttttgatatttgtttctactttggtcttattctacaaaattctttttttaaaactatttatttatttatttatttgagagagagagagacagagagaatcgggggataggggcagaggaagagggaagagcaga

SEQ ID NO: 214047 - DNA, 397 bp, Canis familiaris; identical to SEQ ID NO: 3940
  misc_feature (115)..(115): n is a, c, g, or t
  misc_feature (138)..(138): n is a, c, g, or t
  misc_feature (268)..(268): n is a, c, g, or t
  misc_feature (271)..(271): n is a, c, g, or t
  misc_feature (277)..(277): n is a, c, g, or t
  misc_feature (285)..(285): n is a, c, g, or t
  misc_feature (293)..(293): n is a, c, g, or t
  misc_feature (296)..(296): n is a, c, g, or t
  misc_feature (301)..(301): n is a, c, g, or t
  misc_feature (319)..(320): n is a, c, g, or t
  misc_feature (326)..(326): n is a, c, g, or t
  misc_feature (336)..(336): n is a, c, g, or t
  misc_feature (376)..(376): n is a, c, g, or t

SEQ ID NO: 214048 - DNA, 394 bp, Canis familiaris; identical to SEQ ID NO: 3941
  misc_feature (265)..(265): n is a, c, g, or t
  misc_feature (270)..(270): n is a, c, g, or t
  misc_feature (298)..(298): n is a, c, g, or t
  misc_feature (305)..(305): n is a, c, g, or t
  misc_feature (332)..(332): n is a, c, g, or t
  misc_feature (357)..(357): n is a, c, g, or t
  misc_feature (364)..(364): n is a, c, g, or t

SEQ ID NO: 214049 - DNA, 494 bp, Canis familiaris; identical to SEQ ID NO: 3942
  misc_feature (108)..(108): n is a, c, g, or t
  misc_feature (301)..(302): n is a, c, g, or t
  misc_feature (306)..(306): n is a, c, g, or t
  misc_feature (319)..(319): n is a, c, g, or t
  misc_feature (334)..(334): n is a, c, g, or t
  misc_feature (343)..(343): n is a, c, g, or t
  misc_feature (350)..(350): n is a, c, g, or t
  misc_feature (359)..(359): n is a, c, g, or t
  misc_feature (364)..(364): n is a, c, g, or t
  misc_feature (367)..(367): n is a, c, g, or t
  misc_feature (384)..(384): n is a, c, g, or t
  misc_feature (390)..(390): n is a, c, g, or t
  misc_feature (403)..(403): n is a, c, g, or t
  misc_feature (411)..(411): n is a, c, g, or t
  misc_feature (441)..(441): n is a, c, g, or t
  misc_feature (448)..(448): n is a, c, g, or t
  misc_feature (463)..(463): n is a, c, g, or t
  misc_feature (472)..(472): n is a, c, g, or t

SEQ ID NO: 214050 - DNA, 368 bp, Canis familiaris; identical to SEQ ID NO: 3943
  misc_feature (83)..(83): n is a, c, g, or t

SEQ ID NO: 214051 - DNA, 565 bp, Canis familiaris; identical to SEQ ID NO: 3944

SEQ ID NO: 214052 - DNA, 261 bp, Canis familiaris; identical to SEQ ID NO: 3945
  misc_feature (42)..(42): n is a, c, g, or t
  misc_feature (81)..(81): n is a, c, g, or t
  misc_feature (100)..(100): n is a, c, g, or t
  misc_feature (121)..(121): n is a, c, g, or t
  misc_feature (127)..(127): n is a, c, g, or t
  misc_feature (131)..(131): n is a, c, g, or t
  misc_feature (133)..(133): n is a, c, g, or t
  misc_feature (139)..(139): n is a, c, g, or t
  misc_feature (142)..(142): n is a, c, g, or t
  misc_feature (149)..(149): n is a, c, g, or t
  misc_feature (160)..(160): n is a, c, g, or t
  misc_feature (162)..(162): n is a, c, g, or t
  misc_feature (169)..(169): n is a, c, g, or t
  misc_feature (175)..(175): n is a, c, g, or t
  misc_feature (195)..(196): n is a, c, g, or t
  misc_feature (229)..(229): n is a, c, g, or t

SEQ ID NO: 214053 - DNA, 600 bp, Canis familiaris
tacaacgcgattacaaaaaggaatacttcatttaagtgtaatactgtctttatggacgtaccgtggtcggaaagtggagctaaaggtcacgaacgaatacacgtgagaacagggacaaaggcgggacgtccctggagcctagtctagcacagcgagcccagtgggtaggggaagggaascagggatgaacagagacttatttggggggcagtggtggtattgtcaatgagctgcttctaggagcttaaacccaagggccggctcaggggccagacacacaggcgtacagctttggtaccatatctcaaagctgcccaaagtcctggccttgtgtcacacacagcagtcgtccccagtcagctttgtttttgtwttctctccaatytacatacacacacacacacacacacacacacacacacacgcgcgcatgcatgcacacgcaatcgagggtgtsttcttkgaccgtccaagctswtatgtctcaggtacctccctgctgtcaaaatcaaagcacgccagactccatcaagccaagcacccttctttcgtaggagagaagccagcacttcgctttcctggatgaacatgagcactcag

SEQ ID NO: 214054 - DNA, 600 bp, Canis familiaris
  misc_feature (276)..(276): n is a, c, g, or t
  misc_feature (321)..(321): n is a, c, g, or t
tgaaggacataacgggcacctttggggatgatgcgcccatctggaagcttgatgtcctccgtgcagcggcgggaaaccaaggtcactggcgggaatggcgtaggctctccttgatgcacatggtggtgaagggcagctgggtcaggtcatccctggggagcataaaacatggaatgtgggtgacttcaggccagaccacagcaacactcacttcctcaaacaggcacacacacacacacacacacacacacacaagcacacayatgyattcaggancaacgtgcaggamaccagtctagggtctcagasttgtcccatgcnacatatcactmatcctcagcatgcaaaatatctgacccccaaccaatcagagcagcacccacaggcttctgcacacccagcattaaccctttaactgatgaattatgyggcagtcagggaatagctgggagtggtgccaggatagtcaggggacccagggcagcagtagtttaccagccygtatgaatcwatttcwatatttaaaaacccatacattctgtcctatgctattaactttttttcattgtattccagggtcccaatttggattaattagaa

SEQ ID NO: 214055 - DNA, 480 bp, Canis familiaris; identical to SEQ ID NO: 3948
  misc_feature (121)..(121): n is a, c, g, or t
  misc_feature (142)..(142): n is a, c, g, or t
  misc_feature (158)..(158): n is a, c, g, or t
  misc_feature (161)..(161): n is a, c, g, or t
  misc_feature (169)..(169): n is a, c, g, or t
  misc_feature (204)..(204): n is a, c, g, or t
  misc_feature (215)..(215): n is a, c, g, or t
  misc_feature (252)..(252): n is a, c, g, or t
  misc_feature (301)..(301): n is a, c, g, or t
  misc_feature (353)..(353): n is a, c, g, or t
  misc_feature (366)..(366): n is a, c, g, or t
  misc_feature (388)..(388): n is a, c, g, or t
  misc_feature (411)..(411): n is a, c, g, or t
  misc_feature (470)..(470): n is a, c, g, or t

SEQ ID NO: 214056 - DNA, 405 bp, Canis familiaris; identical to SEQ ID NO: 3949
  misc_feature (157)..(157): n is a, c, g, or t
  misc_feature (169)..(169): n is a, c, g, or t
  misc_feature (200)..(200): n is a, c, g, or t
  misc_feature (205)..(206): n is a, c, g, or t
  misc_feature (233)..(233): n is a, c, g, or t
  misc_feature (245)..(245): n is a, c, g, or t
  misc_feature (254)..(254): n is a, c, g, or t
  misc_feature (258)..(258): n is a, c, g, or t
  misc_feature (285)..(285): n is a, c, g, or t
  misc_feature (296)..(296): n is a, c, g, or t
  misc_feature (303)..(303): n is a, c, g, or t
  misc_feature (313)..(313): n is a, c, g, or t
  misc_feature (335)..(335): n is a, c, g, or t
  misc_feature (347)..(347): n is a, c, g, or t
  misc_feature (366)..(366): n is a, c, g, or t

SEQ ID NO: 214057 - DNA, 334 bp, Canis familiaris; identical to SEQ ID NO: 3950
  misc_feature (33)..(33): n is a, c, g, or t
  misc_feature (92)..(92): n is a, c, g, or t
  misc_feature (106)..(106): n is a, c, g, or t
  misc_feature (108)..(108): n is a, c, g, or t
  misc_feature (115)..(115): n is a, c, g, or t
  misc_feature (131)..(134): n is a, c, g, or t
  misc_feature (150)..(150): n is a, c, g, or t
  misc_feature (167)..(167): n is a, c, g, or t
  misc_feature (178)..(178): n is a, c, g, or t
  misc_feature (193)..(193): n is a, c, g, or t
  misc_feature (204)..(204): n is a, c, g, or t
  misc_feature (207)..(207): n is a, c, g, or t
  misc_feature (219)..(221): n is a, c, g, or t
  misc_feature (225)..(225): n is a, c, g, or t
  misc_feature (241)..(241): n is a, c, g, or t
  misc_feature (263)..(263): n is a, c, g, or t
  misc_feature (278)..(278): n is a, c, g, or t
  misc_feature (299)..(299): n is a, c, g, or t
  misc_feature (307)..(307): n is a, c, g, or t

SEQ ID NO: 214058 - DNA, 875 bp, Canis familiaris; identical to SEQ ID NO: 3951

SEQ ID NO: 214059 - DNA, 510 bp, Canis familiaris; identical to SEQ ID NO: 3952
  misc_feature (55)..(55): n is a, c, g, or t
  misc_feature (199)..(199): n is a, c, g, or t
  misc_feature (369)..(369): n is a, c, g, or t

SEQ ID NO: 214060 - DNA, 475 bp, Canis familiaris; identical to SEQ ID NO: 3953
  misc_feature (173)..(173): n is a, c, g, or t
  misc_feature (218)..(218): n is a, c, g, or t
  misc_feature (269)..(270): n is a, c, g, or t
  misc_feature (279)..(279): n is a, c, g, or t
  misc_feature (296)..(296): n is a, c, g, or t
  misc_feature (445)..(445): n is a, c, g, or t

SEQ ID NO: 214061 - DNA, 510 bp, Canis familiaris; identical to SEQ ID NO: 3954
  misc_feature (40)..(40): n is a, c, g, or t
  misc_feature (108)..(108): n is a, c, g, or t
  misc_feature (120)..(120): n is a, c, g, or t
  misc_feature (131)..(131): n is a, c, g, or t
  misc_feature (433)..(433): n is a, c, g, or t

SEQ ID NO: 214062 - DNA, 217 bp, Canis familiaris; identical to SEQ ID NO: 3955
  misc_feature (5)..(5): n is a, c, g, or t
  misc_feature (115)..(115): n is a, c, g, or t
  misc_feature (173)..(173): n is a, c, g, or t

SEQ ID NO: 214063 - DNA, 541 bp, Canis familiaris; identical to SEQ ID NO: 3956
  misc_feature (348)..(348): n is a, c, g, or t

SEQ ID NO: 214064 - DNA, 460 bp, Canis familiaris; identical to SEQ ID NO: 3957
  misc_feature (59)..(59): n is a, c, g, or t
  misc_feature (163)..(163): n is a, c, g, or t
  misc_feature (173)..(173): n is a, c, g, or t
  misc_feature (182)..(182): n is a, c, g, or t
  misc_feature (208)..(208): n is a, c, g, or t
  misc_feature (244)..(244): n is a, c, g, or t
  misc_feature (278)..(278): n is a, c, g, or t
  misc_feature (339)..(339): n is a, c, g, or t
  misc_feature (422)..(422): n is a, c, g, or t

SEQ ID NO: 214065 - DNA, 543 bp, Canis familiaris; identical to SEQ ID NO: 3958
  misc_feature (26)..(26): n is a, c, g, or t
  misc_feature (219)..(219): n is a, c, g, or t
  misc_feature (241)..(241): n is a, c, g, or t
  misc_feature (508)..(508): n is a, c, g, or t

SEQ ID NO: 214066 - DNA, 356 bp, Canis familiaris; identical to SEQ ID NO: 3959
  misc_feature (99)..(99): n is a, c, g, or t
  misc_feature (238)..(238): n is a, c, g, or t

SEQ ID NO: 214067 - DNA, 463 bp, Canis familiaris; identical to SEQ ID NO: 3960
  misc_feature (69)..(69): n is a, c, g, or t
  misc_feature (93)..(93): n is a, c, g, or t
  misc_feature (111)..(111): n is a, c, g, or t
  misc_feature (337)..(337): n is a, c, g, or t
  misc_feature (419)..(419): n is a, c, g, or t

SEQ ID NO: 214068 - DNA, 210 bp, Canis familiaris; identical to SEQ ID NO: 3961
  misc_feature (61)..(61): n is a, c, g, or t
  misc_feature (125)..(125): n is a, c, g, or t
  misc_feature (157)..(157): n is a, c, g, or t
  misc_feature (162)..(163): n is a, c, g, or t

SEQ ID NO: 214069 - DNA, 532 bp, Canis familiaris; identical to SEQ ID NO: 3962
  misc_feature (243)..(243): n is a, c, g, or t
  misc_feature (263)..(263): n is a, c, g, or t

SEQ ID NO: 214070 - DNA, 239 bp, Canis familiaris; identical to SEQ ID NO: 3963
  misc_feature (24)..(24): n is a, c, g, or t
  misc_feature (28)..(28): n is a, c, g, or t
  misc_feature (32)..(32): n is a, c, g, or t
  misc_feature (196)..(196): n is a, c, g, or t

SEQ ID NO: 214071 - DNA, 387 bp, Canis familiaris; identical to SEQ ID NO: 3964
  misc_feature (179)..(179): n is a, c, g, or t
  misc_feature (187)..(187): n is a, c, g, or t
  misc_feature (202)..(202): n is a, c, g, or t
  misc_feature (241)..(241): n is a, c, g, or t
  misc_feature (312)..(312): n is a, c, g, or t

SEQ ID NO: 214072 - DNA, 380 bp, Canis familiaris; identical to SEQ ID NO: 3965
  misc_feature (49)..(49): n is a, c, g, or t
  misc_feature (94)..(94): n is a, c, g, or t
  misc_feature (106)..(106): n is a, c, g, or t
  misc_feature (121)..(121): n is a, c, g, or t
  misc_feature (124)..(124): n is a, c, g, or t
  misc_feature (127)..(127): n is a, c, g, or t
  misc_feature (131)..(131): n is a, c, g, or t
  misc_feature (133)..(133): n is a, c, g, or t
  misc_feature (141)..(141): n is a, c, g, or t
  misc_feature (173)..(173): n is a, c, g, or t
  misc_feature (196)..(196): n is a, c, g, or t
  misc_feature (241)..(241): n is a, c, g, or t
  misc_feature (263)..(263): n is a, c, g, or t

SEQ ID NO: 214073 - DNA, 600 bp, Canis familiaris
atattgcacgtgtgtttgtgtgtgtgtgtgtgtgtgtgtgtgtgtgtgtgtgtgtctgcctgcatatgtgtctgagacacggatacattctctggtgaacactctctccaacattccagccaaaagccagaagtcaagtgggaaatatgtactccctgggcgctccgggagagtttggggtcacaggcctctccacagtgcaatgattcatggctcagggagtcggcatgagcatgctgttccatggtgagcctggcactcactgtctgggtattcggagacactttctggaaagggccttgtgggaatacacatacagacacacacacagagcccagactttcatcaacctgagactgctgcatgtccacacaatgtatggttgaggctgggaagtagtggtggacgagtgtatggtaccgcatacaggacatcagacacgaaaaactggtattgcatcccaaaatctcctttcctggttccaaaataaacaggcctcaaaggggacgcttgtttgtgcttgtgcaccaggcggggcttccgtcatgcctagggtcgaagtctacaggcgcagtagcaggttaaagagacgagaaacaa

SEQ ID NO: 214074 - DNA, 600 bp, Canis familiaris
ctgagcccttgarggggagstgcttggactccttcacctctgactcwcacccytctagaagttgtcctgtastcasccctctcctcwctgtccacggamgtcctgatgctgctgtcaacaaggctccctgggcctcattttcctcatctacagaatgggtggttagaactcggtcttcaggactcttctacttaacaattttgaggcaataagtaactgaagtgggacaggggcaaaggtgaaaatttttttcctccttctatgcttataaagatattgttgttgcgaatattcatttgggtggatgtttttaagttccttgaagtcagaggccacatatccatatgttgtatttgattttgtgcaaatctttagcaaaaaaggtgtacattcaatcaaacaccaaccaaaattaaagttgtggaagcatcaggaagataaacgttgcttataatccccagctgctgccttggaaggagaggctgtgggtagtgagcacggtgatgggcactcaaggtcaagcttaggcttwacctttgaacttctcagcgagtcattgaaccctagcccctgcctctccaaggaagtgcagtcctctag

SEQ ID NO: 214075 - DNA, 600 bp, Canis familiaris
acagagtaggcaacagacaaaatatatacctcaaaaaaatcaaaagttcaattactttttgattacaactacaataattgttttgttgatatgactgatatcraaaaaagtaggatttactakttgacaaagcacaaactttagagtcagataaactttgatttaaatgccaacattgttattttatagcacatgtgtagctttgggcaagtcagtaatctctgaactgcagtctcctcacttgtrwaacacagcagtbccamtcttgtattgtcattgtaaggacwtgagagtgtgtggttgtgtgtgtgtgtgtgtgtgtgtgtgtgtgtgtgtgcatgtacagtgctcaataaataatgacttttaattgcattgctgatttttggatgcattgagagattaatttcatattattaaggacagtcaggttgaaagcatattcatttatccatccattcctatatttcatctcaattttcacaacaaacctgtaaaacacataccatgtaccctctactgatgaaaaactgaacaattcaactggtattacacagtgactatatatgatatgggattaaagcttagtcctctcagagt

SEQ ID NO: 214076 - DNA, 889 bp, Canis familiaris; identical to SEQ ID NO: 3969
  misc_feature (472)..(472): n is a, c, g, or t

SEQ ID NO: 214077 - DNA, 459 bp, Canis familiaris; identical to SEQ ID NO: 3970
  misc_feature (130)..(130): n is a, c, g, or t
  misc_feature (358)..(358): n is a, c, g, or t
  misc_feature (410)..(410): n is a, c, g, or t

SEQ ID NO: 214078 - DNA, 600 bp, Canis familiaris
gcttttgactccctttacctagtttgtccatccccctcccacccasacatgtacctgmakcmaccaccactttgtcctctgtatccatgastacagttwttgtgtgtgtgtgtttttttaaagattccccatacaaatgaactgtacagtatttctctttctctgtctgacttatttcactcacaagatacccgtaaattttatccatgttgttgcaaatgacaggattcccctctttttcttattactgagtaatagtcctctgtgtgtgtgtgtgtgtgtgtgtgtgtgcacagcatyttctttattcatacacctactgatggacagttcagttgtttccacgtctcgtctcggttcttgtacataatgctgcagtgaacttggggtgccaggtatctttttgaatcaatgattctgtttcttttgggtgactaaccagtagtggaattaccgggtccatttttttactttctgaggaacctycataccgagtggctgtcctttctgcattcccaccagcagtagaccctttccccacatcctcgccaacaccttttgtttctcgtggtttttattctaccccttgtgacaggtgtg

SEQ ID NO: 214079 - DNA, 173 bp, Canis familiaris; identical to SEQ ID NO: 3972
  misc_feature (25)..(25): n is a, c, g, or t
  misc_feature (41)..(41): n is a, c, g, or t
  misc_feature (44)..(44): n is a, c, g, or t
  misc_feature (58)..(58): n is a, c, g, or t
  misc_feature (62)..(64): n is a, c, g, or t
  misc_feature (137)..(137): n is a, c, g, or t
  misc_feature (168)..(168): n is a, c, g, or t

SEQ ID NO: 214080 - DNA, 472 bp, Canis familiaris; identical to SEQ ID NO: 3973
  misc_feature (171)..(171): n is a, c, g, or t
  misc_feature (189)..(189): n is a, c, g, or t
  misc_feature (201)..(201): n is a, c, g, or t
  misc_feature (203)..(203): n is a, c, g, or t
  misc_feature (269)..(269): n is a, c, g, or t

SEQ ID NO: 214081 - DNA, 316 bp, Canis familiaris; identical to SEQ ID NO: 3974
  misc_feature (38)..(38): n is a, c, g, or t
  misc_feature (59)..(59): n is a, c, g, or t
  misc_feature (70)..(70): n is a, c, g, or t
  misc_feature (91)..(91): n is a, c, g, or t
  misc_feature (230)..(230): n is a, c, g, or t

SEQ ID NO: 214082 - DNA, 470 bp, Canis familiaris; identical to SEQ ID NO: 3975
  misc_feature (140)..(140): n is a, c, g, or t
  misc_feature (278)..(278): n is a, c, g, or t
  misc_feature (345)..(345): n is a, c, g, or t
  misc_feature (432)..(432): n is a, c, g, or t

SEQ ID NO: 214083 - DNA, 319 bp, Canis familiaris; identical to SEQ ID NO: 3976
  misc_feature (31)..(31): n is a, c, g, or t
  misc_feature (33)..(33): n is a, c, g, or t
  misc_feature (51)..(51): n is a, c, g, or t
  misc_feature (55)..(56): n is a, c, g, or t
  misc_feature (61)..(61): n is a, c, g, or t
  misc_feature (68)..(68): n is a, c, g, or t
  misc_feature (71)..(71): n is a, c, g, or t
  misc_feature (74)..(74): n is a, c, g, or t
  misc_feature (84)..(84): n is a, c, g, or t
  misc_feature (273)..(274): n is a, c, g, or t
  misc_feature (282)..(283): n is a, c, g, or t
  misc_feature (297)..(297): n is a, c, g, or t

SEQ ID NO: 214084 - DNA, 261 bp, Canis familiaris; identical to SEQ ID NO: 3977
  misc_feature (12)..(12): n is a, c, g, or t
  misc_feature (21)..(21): n is a, c, g, or t
  misc_feature (33)..(33): n is a, c, g, or t
  misc_feature (57)..(57): n is a, c, g, or t
  misc_feature (77)..(77): n is a, c, g, or t
  misc_feature (85)..(85): n is a, c, g, or t
  misc_feature (89)..(89): n is a, c, g, or t
  misc_feature (99)..(99): n is a, c, g, or t
  misc_feature (143)..(143): n is a, c, g, or t
  misc_feature (145)..(145): n is a, c, g, or t
  misc_feature (161)..(161): n is a, c, g, or t
  misc_feature (163)..(163): n is a, c, g, or t
  misc_feature (165)..(165): n is a, c, g, or t
  misc_feature (221)..(221): n is a, c, g, or t
  misc_feature (258)..(258): n is a, c, g, or t

SEQ ID NO: 214085 - DNA, 370 bp, Canis familiaris; identical to SEQ ID NO: 3978
  misc_feature (10)..(10): n is a, c, g, or t
  misc_feature (40)..(40): n is a, c, g, or t
  misc_feature (76)..(76): n is a, c, g, or t
  misc_feature (124)..(124): n is a, c, g, or t
  misc_feature (235)..(235): n is a, c, g, or t
  misc_feature (283)..(283): n is a, c, g, or t
  misc_feature (289)..(289): n is a, c, g, or t
  misc_feature (296)..(296): n is a, c, g, or t

SEQ ID NO: 214086 - DNA, 120 bp, Canis familiaris; identical to SEQ ID NO: 3979
  misc_feature (14)..(14): n is a, c, g, or t
  misc_feature (22)..(22): n is a, c, g, or t

SEQ ID NO: 214087 - DNA, 390 bp, Canis familiaris; identical to SEQ ID NO: 3980
  misc_feature (95)..(95): n is a, c, g, or t
  misc_feature (226)..(226): n is a, c, g, or t
  misc_feature (296)..(296): n is a, c, g, or t
  misc_feature (368)..(368): n is a, c, g, or t

SEQ ID NO: 214088 - DNA, 420 bp, Canis familiaris; identical to SEQ ID NO: 3981
  misc_feature (12)..(12): n is a, c, g, or t
  misc_feature (16)..(16): n is a, c, g, or t
  misc_feature (42)..(42): n is a, c, g, or t
  misc_feature (58)..(58): n is a, c, g, or t
  misc_feature (62)..(62): n is a, c, g, or t
  misc_feature (141)..(141): n is a, c, g, or t
  misc_feature (184)..(184): n is a, c, g, or t
  misc_feature (197)..(197): n is a, c, g, or t
  misc_feature (260)..(260): n is a, c, g, or t
  misc_feature (267)..(267): n is a, c, g, or t
  misc_feature (292)..(292): n is a, c, g, or t
  misc_feature (358)..(358): n is a, c, g, or t
  misc_feature (362)..(362): n is a, c, g, or t
  misc_feature (364)..(364): n is a, c, g, or t
  misc_feature (368)..(368): n is a, c, g, or t
  misc_feature (390)..(390): n is a, c, g, or t

SEQ ID NO: 214089 - DNA, 420 bp, Canis familiaris; identical to SEQ ID NO: 3982
  misc_feature (72)..(72): n is a, c, g, or t
  misc_feature (161)..(161): n is a, c, g, or t
  misc_feature (175)..(175): n is a, c, g, or t
  misc_feature (233)..(233): n is a, c, g, or t
  misc_feature (243)..(243): n is a, c, g, or t
  misc_feature (252)..(252): n is a, c, g, or t
  misc_feature (258)..(258): n is a, c, g, or t
  misc_feature (291)..(291): n is a, c, g, or t
  misc_feature (314)..(314): n is a, c, g, or t
  misc_feature (317)..(317): n is a, c, g, or t
  misc_feature (338)..(338): n is a, c, g, or t
  misc_feature (349)..(349): n is a, c, g, or t
  misc_feature (358)..(358): n is a, c, g, or t
  misc_feature (368)..(368): n is a, c, g, or t
  misc_feature (371)..(371): n is a, c, g, or t
  misc_feature (377)..(377): n is a, c, g, or t
  misc_feature (382)..(382): n is a, c, g, or t
  misc_feature (388)..(388): n is a, c, g, or t
  misc_feature (392)..(393): n is a, c, g, or t

SEQ ID NO: 214090 - DNA, 230 bp, Canis familiaris; identical to SEQ ID NO: 3983

SEQ ID NO: 214091 - DNA, 244 bp, Canis familiaris; identical to SEQ ID NO: 3984

SEQ ID NO: 214092 - DNA, 344 bp, Canis familiaris; identical to SEQ ID NO: 3985
  misc_feature (121)..(121): n is a, c, g, or t
  misc_feature (132)..(132): n is a, c, g, or t
  misc_feature (294)..(294): n is a, c, g, or t
  misc_feature (304)..(304): n is a, c, g, or t
  misc_feature (311)..(311): n is a, c, g, or t

SEQ ID NO: 214093 - DNA, 370 bp, Canis familiaris; identical to SEQ ID NO: 3986

SEQ ID NO: 214094 - DNA, 207 bp, Canis familiaris; identical to SEQ ID NO: 3987
  misc_feature (10)..(10): n is a, c, g, or t
  misc_feature (35)..(35): n is a, c, g, or t
  misc_feature (42)..(43): n is a, c, g, or t
  misc_feature (53)..(53): n is a, c, g, or t
  misc_feature (58)..(58): n is a, c, g, or t
  misc_feature (64)..(64): n is a, c, g, or t

SEQ ID NO: 214095 - DNA, 600 bp, Canis familiaris
tgagttggaccccctgcaacctgtagggcaggcatctcagcccttggcccctttcggtgggataagggaaaccttctcccccaagggtggctgcccaccactctggtgattgggcamgtaggggtgagggcaggcaactggtctgtgagggtgtgtgtgtgtgtgtgtgtgtgtgtgtgagtgtgtgtgacatccggaaaccaggttgtgaggagagaggggggtcagccagctcatggccatgaggggagcaggagcctggaggacctttagcacagascactgttagaccatcacggcactcactcttcctgtggcagaaacacccggtggcttagttcagttgcctcacacaaccacttatgttagttttggtctataggtaagtgtcggctcttattattcattgcatttgaggagttttcagccattattccttaaaacattcttactctttatttcccgtccttcaggattcctattacgcgtatgttggtgggacagctggtatctagaagtttcttagtctgtgctcatctttcttcattctttttccctttctgctcctcagactgagtggtttcaattgatccccgggta

SEQ ID NO: 214096 - DNA, 480 bp, Canis familiaris; identical to SEQ ID NO: 3989
  misc_feature (130)..(130): n is a, c, g, or t

SEQ ID NO: 214097 - DNA, 410 bp, Canis familiaris; identical to SEQ ID NO: 3990
  misc_feature (74)..(74): n is a, c, g, or t
  misc_feature (145)..(145): n is a, c, g, or t
  misc_feature (170)..(170): n is a, c, g, or t
  misc_feature (182)..(182): n is a, c, g, or t
  misc_feature (222)..(222): n is a, c, g, or t
  misc_feature (242)..(242): n is a, c, g, or t
  misc_feature (292)..(292): n is a, c, g, or t
  misc_feature (294)..(294): n is a, c, g, or t
  misc_feature (304)..(304): n is a, c, g, or t

SEQ ID NO: 214098 - DNA, 420 bp, Canis familiaris; identical to SEQ ID NO: 3991
  misc_feature (413)..(413): n is a, c, g, or t

SEQ ID NO: 214099 - DNA, 600 bp, Canis familiaris
  misc_feature (62)..(62): n is a, c, g, or t
ttatcaastgskgcrtcaaaacaacttcaaacttgtgagtwaaaacagstattktgtttwyncccatgaytctgtggctccggaatctggtrgggggcacagctgggatggctgstccctgctccacggtgtgwggggcttcgggtgggatgcctgacatgacacagcaggacttattcactcccatgctgttacctcagtgttcctccatgggattgctttgtccaagcactttgtcatctcctggggcctctccatgtggtctctctctctccggccggctggctggcctggacttcttacatgcgggcctcagactctaagagcataaaagcaggcctttttaacacctggactcagaggtccctaaacagaactgtctccacattccactggtcagagcagtgccaggcctgacccagacgcaatgggtctggggaatggacctcacacctcatgggatggaggctagctagcacacagtatatcatgaggtgttcctgtgttgttcattactttccagaagcctgatttttaggagatacagagatttcttttgatattttatktaaccaaaccactgatttgtggctatgatag

SEQ ID NO: 214100 - DNA, 330 bp, Canis familiaris; identical to SEQ ID NO: 3993
  misc_feature (244)..(244): n is a, c, g, or t
  misc_feature (248)..(248): n is a, c, g, or t
  misc_feature (262)..(262): n is a, c, g, or t

SEQ ID NO: 214101 - DNA, 600 bp, Canis familiaris
  misc_feature (128)..(128): n is a, c, g, or t
tcagaaagtctcttatgagccataaaggtktygtttttgtyttgtttctggtgtgtgtgtgtgtgtgtgtgtgtgtgtgtgtgtgtgaastcggatattcttgaaratwmwaaagcawakagattagnggacaagcaaagtcagggatctgactctgtttaaatagaactgcaaaatgcttttgttcatttgtccatggtaccgagacaaataccagtccctggggctgtgtttcccactccagggaatgccgtctacagacccttccatccttccagacctacctctcttttcagctstctctctccataccatcataaccctcccaccttcatctcaacaggtggacccacaggtgggttgatggggaggtagagcatgaggawccaagcttaagaaattctttcaccccaaaacatctcctgaatatctcattgctaatgactgaaatcctgttcttggccaccaattcttttagattaaaaaaatcacctcctattaaaacccaagtaacccctggcagagtcacaaagaaaactgctgcaccttaatatgaaggactgacccgggagccagcaaattcttctacaaaggtcctct

SEQ ID NO: 214102 - DNA, 454 bp, Canis familiaris; identical to SEQ ID NO: 3995
  misc_feature (35)..(35): n is a, c, g, or t
  misc_feature (40)..(40): n is a, c, g, or t
  misc_feature (42)..(43): n is a, c, g, or t
  misc_feature (55)..(55): n is a, c, g, or t
  misc_feature (66)..(66): n is a, c, g, or t
  misc_feature (68)..(68): n is a, c, g, or t
  misc_feature (76)..(76): n is a, c, g, or t
  misc_feature (136)..(136): n is a, c, g, or t
  misc_feature (184)..(184): n is a, c, g, or t
  misc_feature (244)..(244): n is a, c, g, or t
  misc_feature (255)..(255): n is a, c, g, or t
  misc_feature (309)..(309): n is a, c, g, or t
  misc_feature (346)..(346): n is a, c, g, or t
  misc_feature (351)..(351): n is a, c, g, or t
  misc_feature (358)..(358): n is a, c, g, or t
  misc_feature (409)..(409): n is a, c, g, or t
  misc_feature (443)..(443): n is a, c, g, or t

SEQ ID NO: 214103 - DNA, 280 bp, Canis familiaris; identical to SEQ ID NO: 3996
  misc_feature (81)..(81): n is a, c, g, or t
  misc_feature (138)..(138): n is a, c, g, or t
  misc_feature (228)..(228): n is a, c, g, or t

SEQ ID NO: 214104 - DNA, 464 bp, Canis familiaris; identical to SEQ ID NO: 3997
  misc_feature (45)..(45): n is a, c, g, or t
  misc_feature (56)..(57): n is a, c, g, or t
  misc_feature (102)..(102): n is a, c, g, or t
  misc_feature (146)..(146): n is a, c, g, or t
  misc_feature (148)..(148): n is a, c, g, or t
  misc_feature (165)..(165): n is a, c, g, or t
  misc_feature (343)..(343): n is a, c, g, or t
  misc_feature (361)..(361): n is a, c, g, or t
  misc_feature (372)..(372): n is a, c, g, or t

SEQ ID NO: 214105 - DNA, 395 bp, Canis familiaris; identical to SEQ ID NO: 3998
  misc_feature (78)..(78): n is a, c, g, or t
  misc_feature (99)..(99): n is a, c, g, or t
  misc_feature (106)..(106): n is a, c, g, or t
  misc_feature (122)..(122): n is a, c, g, or t
  misc_feature (133)..(133): n is a, c, g, or t
  misc_feature (141)..(141): n is a, c, g, or t
  misc_feature (153)..(153): n is a, c, g, or t
  misc_feature (175)..(175): n is a, c, g, or t
  misc_feature (281)..(281): n is a, c, g, or t
  misc_feature (327)..(328): n is a, c, g, or t

SEQ ID NO: 214106 - DNA, 262 bp, Canis familiaris; identical to SEQ ID NO: 3999
  misc_feature (12)..(12): n is a, c, g, or t
  misc_feature (50)..(50): n is a, c, g, or t

SEQ ID NO: 214107 - DNA, 600 bp, Canis familiaris
gtgtgtgtgtgtatttwtatgttagacttatttagggcaaagacaatttatgcccaccatttctagtgtaattattgagttagagtaattatagtagatgctcagtaaagttttgacaataaatgaacaaatggatgattaaatgctagaaatatcaggacttgcattttttgactttctaacacaactagatagaaatatttcctgaaaaattattatcagatattatgaattaactttattgtctttgtaacttatcatcaacccaaacaagcaaagcgtgttattcatgaaaaaaattaaagccaaagtttcaaaagttaatattgagagaatagaataaatcaaactgaaaactttcccatatgttcggtagtaaagaammaaagaaaaacaaaccttaaaatatgcctttgwaaacacgaagagaagaggaggtcctgagagcccaagatagagtgtktcaaatggcagggggatwatatgaaaatgtgaaatgtgaaaatgagtgaggcacacagtcctccactccatcaacactctctgagatgctgtaaaagggacatattggagctcaagcttaactcagaagtgggaatt

SEQ ID NO: 214108 - DNA, 600 bp, Canis familiaris; identical to SEQ ID NO: 4001
  misc_feature (48)..(48): n is a, c, g, or t

SEQ ID NO: 214109 - DNA, 350 bp, Canis familiaris; identical to SEQ ID NO: 4002
  misc_feature (150)..(150): n is a, c, g, or t
  misc_feature (163)..(163): n is a, c, g, or t
  misc_feature (192)..(192): n is a, c, g, or t
  misc_feature (225)..(225): n is a, c, g, or t
  misc_feature (240)..(240): n is a, c, g, or t
  misc_feature (304)..(305): n is a, c, g, or t
  misc_feature (325)..(325): n is a, c, g, or t

SEQ ID NO: 214110 - DNA, 376 bp, Canis familiaris; identical to SEQ ID NO: 4003
  misc_feature (34)..(34): n is a, c, g, or t
  misc_feature (124)..(124): n is a, c, g, or t
  misc_feature (133)..(133): n is a, c, g, or t
  misc_feature (232)..(232): n is a, c, g, or t
  misc_feature (326)..(326): n is a, c, g, or t
  misc_feature (341)..(341): n is a, c, g, or t
  misc_feature (350)..(350): n is a, c, g, or t

SEQ ID NO: 214111 - DNA, 347 bp, Canis familiaris; identical to SEQ ID NO: 4004
  misc_feature (43)..(44): n is a, c, g, or t
  misc_feature (48)..(48): n is a, c, g, or t
  misc_feature (66)..(66): n is a, c, g, or t
  misc_feature (80)..(80): n is a, c, g, or t
  misc_feature (91)..(91): n is a, c, g, or t
  misc_feature (111)..(111): n is a, c, g, or t
  misc_feature (131)..(131): n is a, c, g, or t
  misc_feature (166)..(166): n is a, c, g, or t

SEQ ID NO: 214112 - DNA, 324 bp, Canis familiaris; identical to SEQ ID NO: 4005
  misc_feature (8)..(8): n is a, c, g, or t
  misc_feature (48)..(48): n is a, c, g, or t
  misc_feature (52)..(52): n is a, c, g, or t
  misc_feature (56)..(56): n is a, c, g, or t
  misc_feature (58)..(58): n is a, c, g, or t
  misc_feature (88)..(88): n is a, c, g, or t
  misc_feature (96)..(96): n is a, c, g, or t

SEQ ID NO: 214113 - DNA, 600 bp, Canis familiaris
cacacacacacacacatacatgcacacacactctgctcccctaacaagatgccaatagtactgaaactcaccagaactgcaagctgtragagtaaaagacacaaaggctgaggatgacgtgwgcagtmaagcctgtcgagggaactatctaacagactgaattttaatatgatagactacaggctaccaaggacctacctacatttgaaagccawgtgtcagagagagacagagtacgtgtatttttctgtaaagtagtgggtagtgtctttaaaacggttytctctgtgtttaaattgagatgattctatttctcccatgcatcaagttatttttaagttcagaatttcagagggtattatccttaattgagacattcacttttctacttkttctctttgtcctaaaaaacatctctaggracaagtatgaagtgacttttctgtttcttttttatttttttaaatattttatttatttatcatgacacacacacacacacagagagacagagagaggcagagacaacaggcagagggagaagcaggctccatgcagtgagcccgacatgtgactcatcctgggaatccaagtcctcta

SEQ ID NO: 214114 - DNA, 600 bp, Canis familiaris
agggaaacaattcaaattttccatgacttcaaaagagaatacttgaaagattgactctagaacaaacattccttttagctcttcctttcttttctcatccctctcaccagacacacacacacacacacacacacacacacacacggagctgaagacaccatttagcccagaagaggacccaggrattacacacaatwataaaaatacaaagaaaaaaawataaaaaaggaaatgaaaaaaatgaaccctaattgcctgacagggaatgattgctatttgggtgtagggtatcctgggaaagacagaacataagggagggaagcctgaggtaactctaactgccacaaaagaaaataaaggtaaataagtaacgacaacaataaactaatggacattgttgtatgccaaatgaaattagcataacaaagctttcttcctgttagcaaagaggcagtgaaggacatgtctgattttgcttgtctgtttcaatcccctgtttacaaatgggaaatctactttttttcacataatcttccctttttatgaaatgccagtcagttgccatttaaaaaagaggactatttgagaaagagtcctcta

SEQ ID NO: 214115 - DNA, 482 bp, Canis familiaris; identical to SEQ ID NO: 4008
  misc_feature (14)..(14): n is a, c, g, or t
  misc_feature (56)..(56): n is a, c, g, or t
  misc_feature (65)..(65): n is a, c, g, or t
  misc_feature (68)..(68): n is a, c, g, or t
  misc_feature (71)..(71): n is a, c, g, or t
  misc_feature (76)..(76): n is a, c, g, or t
  misc_feature (79)..(79): n is a, c, g, or t
  misc_feature (87)..(87): n is a, c, g, or t
  misc_feature (121)..(121): n is a, c, g, or t
  misc_feature (345)..(345): n is a, c, g, or t

SEQ ID NO: 214116 - DNA, 360 bp, Canis familiaris; identical to SEQ ID NO: 4009
  misc_feature (46)..(46): n is a, c, g, or t
  misc_feature (71)..(71): n is a, c, g, or t
  misc_feature (80)..(80): n is a, c, g, or t
  misc_feature (89)..(89): n is a, c, g, or t
  misc_feature (114)..(114): n is a, c, g, or t
  misc_feature (121)..(121): n is a, c, g, or t
  misc_feature (125)..(125): n is a, c, g, or t
  misc_feature (140)..(140): n is a, c, g, or t
  misc_feature (156)..(156): n is a, c, g, or t
  misc_feature (162)..(162): n is a, c, g, or t
  misc_feature (271)..(271): n is a, c, g, or t

SEQ ID NO: 214117 - DNA, 375 bp, Canis familiaris; identical to SEQ ID NO: 4010
  misc_feature (45)..(45): n is a, c, g, or t
  misc_feature (94)..(94): n is a, c, g, or t
  misc_feature (100)..(101): n is a, c, g, or t
  misc_feature (205)..(205): n is a, c, g, or t
  misc_feature (335)..(335): n is a, c, g, or t

SEQ ID NO: 214118 - DNA, 600 bp, Canis familiaris
  misc_feature (512)..(512): n is a, c, g, or t
ttaagavacaamasagaggagggagaaaggggaagagaggaaaagataagatgatmtctgagagggaggcahmccataagagaccctgaactctaggaaacaaactgaggggtactggaggggagggaggtggggctatgggatacctgggtgatgggcattaaggagggcacatgatgtaattagcactgggtattatataagactgatgaatcactgaactctacctctgaaaccaataatatatgttattaattgcatttcaataaaataaaaaatgttcactggcactatgtatattaatgtaacacaatgtttatttactcaagttttcagcttgtattgcctggtatgcttttgtaagaagccaatttttgcgtattgttacagtttcaggttgaagatggaaatgtaatttggggagccatcaacatatagatggtaattaaaggtatgcaactggaaaatattacctggagaataagtgtagatgaaagagaggtggtccaganacaaagtcctatatgctcttaggaaaatggagatattggggcaattgagaattgcttctaggattaagaggttttaagttagtcctct

SEQ ID NO: 214119 - DNA, 520 bp, Canis familiaris; identical to SEQ ID NO: 4012
  misc_feature (32)..(32): n is a, c, g, or t
  misc_feature (408)..(408): n is a, c, g, or t
  misc_feature (482)..(482): n is a, c, g, or t

SEQ ID NO: 214120 - DNA, 600 bp, Canis familiaris
ataagaagggcatacagacacgtagacatacagggagactgtcatgtgaacatagagagaaattaaagtgagaccgccactagccaaagattgccagtaaccaccagaagctaagagagagacttaggacagattctagctcagagcctttggagggttgtggccctgctgacactttcatttcacactgtaacctccaggactgtgacatatcaattgctgttgcttacacacacacacacacacacaccctccccccatttgtggtattttgtcatggcagccctgggaaactcatatggtgcccagtctccagaatatgaaagtawgtactttaaattacacaaaagcacatattaactttctcttagataatgaaatgaagggaggaaaaggctacttgtcacagtgacatggcaaatatagaccagagactggattagagattggtcattctaacattkcamggcgggcataactataaaaggatgaaagtttcaactaagacactgagattgatatcacattttattttattttatttttaaagatttcatttatttgacatagagagagaatcagaaaggcacaagtgagggg

SEQ ID NO: 214121 - DNA, 310 bp, Canis familiaris; identical to SEQ ID NO: 4014
  misc_feature (21)..(21): n is a, c, g, or t
  misc_feature (25)..(25): n is a, c, g, or t
  misc_feature (127)..(127): n is a, c, g, or t
  misc_feature (288)..(288): n is a, c, g, or t

SEQ ID NO: 214122 - DNA, 600 bp, Canis familiaris
ccttcaagagtctgaggacggtggtcttcagagcactgtggccctgggtagggacagactatgggcatgaggcacctatgaggctcctgtacaccccactaccagttccccatcatctccctctggcctggctgagggtggtcatgaacctctcctgtccatagttttgtgcagagtctgggggtgccacctggcagtcttatgatgatccctgagcttcagctcgagactcctagtagtgtcagttccatacatgggatgtgtgtgtgtgtgtgtgtgtgtgtgtgtgcgtttcagaattaagtttgagacctgacatttghacaacaccaatttatgargttctagamaggaggaacctgggcaagaggttctagggtggtcggtcttgagatttgtttattgggtgaaattgttctgggcatttatggcagataatcactttatagtctcactttataataatcacggtaatgatttattgagttttcatctgacacagtacaacattaagatggtagccgctctatctcgcttaacctgaatggtcatctcattaggttggcattatcatctccatgtaacaagatgaacaaactg

SEQ ID NO: 214123 - DNA, 217 bp, Canis familiaris; identical to SEQ ID NO: 4016
  misc_feature (87)..(87): n is a, c, g, or t
  misc_feature (110)..(110): n is a, c, g, or t
  misc_feature (151)..(151): n is a, c, g, or t
  misc_feature (204)..(205): n is a, c, g, or t

SEQ ID NO: 214124 - DNA, 420 bp, Canis familiaris; identical to SEQ ID NO: 4017
  misc_feature (23)..(23): n is a, c, g, or t
  misc_feature (29)..(29): n is a, c, g, or t

SEQ ID NO: 214125 - DNA, 600 bp, Canis familiaris
  misc_feature (529)..(529): n is a, c, g, or t
cttcaatctcgtctttgctccaaaggaagtaaaaagctacagaatgmccaggattagcaaaatctatttccaaaagaaagacacactgctggtaatttgacagcccattatgatgtataaggaaggttagcatcttaaggacaatggttcaagatgtgaggctatctttcatttaatggacaagtactacttgataaatgatcaagctactccagtgttytttgccaggatgtytcatttcccytagtaaaggaagacagctgtccggggatataaatctttgattattcccaattccttaagtttacragaattaaaaaaaaaaatgtttcagatctgtgtcaattactttgaacattcatwtaccttcctgaatgtggcgctagcctggtaaattctcacacacacacacacacacacacacacacacgcatcacgcaggcgcgcgccaccctgcatctcatctaagaagaagaaaagcaacaaggacaaaccacagcctccatacatcaaaagstgccagcacttncagcgcacggtcaccaagctcgcaggcactcccaggtcgtcccgcacacactcagggggtcctctagagtc

SEQ ID NO: 214126 - DNA, 600 bp, Canis familiaris
ttactcaatttactcattggtgagatgagtataatagtagtacttgcctcatagatatgtgggaaggagtgaattaatacatgtaaagtgcttagaagactacttggaaaatgggaaattcagtaaatactagctgctgcttagtattaatagaaggccatttgggtgtcaaattaggaattgttatttccaggagattatcaattttttccattctccccccacacacacacactcacactgacacccacacacccacacacatacwcacacacacacacacacatacacacactttggtcagtgcaaaatcataggatttaaagtagctcaacttttccagaccttaaaacttcagagccttgtccttttccttcccttatacatctcacataagattcttctgtttcagaagattctcattcatattccttcctttaattttagcaactgtagaattcctgtatttgttcagtcgttttattctcatacttgttgctatctccttgcacttgcttctttaacacctacaactggaaacagtttaaaagatggaaacagaaagtcctggataaaattctccaccttctaccttcacca

SEQ ID NO: 214127 - DNA, 300 bp, Canis familiaris; identical to SEQ ID NO: 4020
  misc_feature (253)..(253): n is a, c, g, or t

SEQ ID NO: 214128 - DNA, 479 bp, Canis familiaris; identical to SEQ ID NO: 4021
  misc_feature (84)..(85): n is a, c, g, or t
  misc_feature (92)..(92): n is a, c, g, or t
  misc_feature (130)..(130): n is a, c, g, or t
  misc_feature (137)..(137): n is a, c, g, or t
  misc_feature (163)..(163): n is a, c, g, or t
  misc_feature (187)..(187): n is a, c, g, or t
  misc_feature (220)..(220): n is a, c, g, or t
  misc_feature (227)..(227): n is a, c, g, or t
  misc_feature (229)..(230): n is a, c, g, or t
  misc_feature (232)..(232): n is a, c, g, or t
  misc_feature (242)..(242): n is a, c, g, or t
  misc_feature (248)..(248): n is a, c, g, or t
  misc_feature (262)..(262): n is a, c, g, or t
  misc_feature (280)..(280): n is a, c, g, or t
  misc_feature (282)..(282): n is a, c, g, or t
  misc_feature (286)..(286): n is a, c, g, or t
  misc_feature (310)..(310): n is a, c, g, or t
  misc_feature (315)..(315): n is a, c, g, or t
  misc_feature (362)..(362): n is a, c, g, or t
  misc_feature (377)..(377): n is a, c, g, or t
  misc_feature (391)..(391): n is a, c, g, or t
  misc_feature (404)..(404): n is a, c, g, or t
  misc_feature (434)..(434): n is a, c, g, or t

SEQ ID NO: 214129 - DNA, 600 bp, Canis familiaris
tcatcccaaacagaaactctgtccctattacacaataactccctatctcccctgctccccaactcctgagaacctctgttctacctctgtctctgaatttacctattctaggkacctcacagcagtgggagtsatgcacaacatgcgtatgtgtgtgtgtgtgtgtgtgtgtgtgtgtgtgtgtgtgtgtgtctggtttattccacttagcatartgtcttcataarggckaatccatagtgtagcttaaatcagaatttccatcctctttccattgcactcatagaccacgttttgttcatacattcatctgttgacactggggttatttctgccttattgtgaatagtgcygcagtgaacattggtgtgtcatccgaggggttttaggcaagtaaggaactggcttcccctcaggaagacttgtcttaaagctgagctgaggatgcatttaagagggacaatactggaaccagagaaagcaatgatgagactatgaagcagccaaattaaggaaaaaatagagcgccgtcaagaccaatgccatggacccgctaacaattctcaggtcatatcaccacattccagaattgtccagcct

SEQ ID NO: 214130 - DNA, 600 bp, Canis familiaris
tttgtctgtaaatgatttttctactaaaaaaagtgatataaaatatgatataaaaatagtaacggtatgtagttaaatattaacacattatgcattctatatgtcaacacctaattcacagaatagttgctaatttgtgtatctatggtgtgaagcagatacctcttgawtttctacctttaattttggagtgcacctaatttcttgaatatggtaatggtgggtagattttagacctaatggctcccttcwcatttaaatatatgccacctacttttgcttttagaattcttaagtgttgcttacttttgaagaaggaagacacaagtcattttttcgtawcatgctcacttcctaaatgttgtaaatcactgaagaaaggaacaattgtatcctgtacatttattctttgtgcccccaaatwacaattctcagcacttcatacatgtcagtaccccagacaatcacacactttcctcatctgtctgaacattttcttactattcatttaccaattcaacaaacatccagtgagtgtctactgtggataaacactacaaggcaggtaagaaagacagaaatggaaaagagacaccagtt

SEQ ID NO: 214131 - DNA, 600 bp, Canis familiaris
tgtgggktgacagtggattcatttccctagagggcagtgtgtatgtgtgtgtgtgtgtgtgtgtgtgtgagacactattcttkagcacatgtgcagtttcwcagctcagcccaggsctcggaaccctgccttacttacttttgctcttttgcccattgctccatgttggacataatctgatcattctctcggcgtatcctacagctctytttaggcgcagaccgctggggcaggcaacaaggctttggtacaagaagaaaatgagatggttagaggtgggagadcataggcctgtcacctccctattccaawatcagkcctcttctctcttcctggaagaagaaacattggttctgctgtccaacccctaggccagagttggaactgccacagcaggatctccaccacccgcagtgcgtgcacacaaagktgacatctctggrcagggcactgtttattgtagagacaaagtagttgcgtatacttacaatgatgatttttgggcaaaggtactaagacagcatgttttgcaaaagcggtatgttaaatccgttttttaacagatggaaggaaaaatatcttgaggaatggatgcctttt

SEQ ID NO: 214132 - DNA, 530 bp, Canis familiaris; identical to SEQ ID NO: 4025

SEQ ID NO: 214133 - DNA, 368 bp, Canis familiaris; identical to SEQ ID NO: 4026
  misc_feature (36)..(36): n is a, c, g, or t
  misc_feature (271)..(271): n is a, c, g, or t

SEQ ID NO: 214134 - DNA, 298 bp, Canis familiaris; identical to SEQ ID NO: 4027
  misc_feature (82)..(83): n is a, c, g, or t
  misc_feature (96)..(96): n is a, c, g, or t
  misc_feature (100)..(100): n is a, c, g, or t
  misc_feature (109)..(109): n is a, c, g, or t
  misc_feature (118)..(118): n is a, c, g, or t
  misc_feature (121)..(121): n is a, c, g, or t
  misc_feature (139)..(139): n is a, c, g, or t
  misc_feature (149)..(149): n is a, c, g, or t
  misc_feature (160)..(160): n is a, c, g, or t
  misc_feature (165)..(165): n is a, c, g, or t
  misc_feature (168)..(168): n is a, c, g, or t
  misc_feature (175)..(175): n is a, c, g, or t
  misc_feature (180)..(180): n is a, c, g, or t
  misc_feature (185)..(185): n is a, c, g, or t
  misc_feature (191)..(191): n is a, c, g, or t
  misc_feature (195)..(195): n is a, c, g, or t
  misc_feature (202)..(203): n is a, c, g, or t
  misc_feature (215)..(216): n is a, c, g, or t
  misc_feature (225)..(225): n is a, c, g, or t
  misc_feature (229)..(229): n is a, c, g, or t
  misc_feature (233)..(233): n is a, c, g, or t
  misc_feature (235)..(235): n is a, c, g, or t
  misc_feature (237)..(237): n is a, c, g, or t
  misc_feature (274)..(275): n is a, c, g, or t
  misc_feature (281)..(281): n is a, c, g, or t
  misc_feature (290)..(290): n is a, c, g, or t

SEQ ID NO: 214135 - DNA, 402 bp, Canis familiaris; identical to SEQ ID NO: 4028
  misc_feature (83)..(83): n is a, c, g, or t
  misc_feature (275)..(275): n is a, c, g, or t
  misc_feature (288)..(288): n is a, c, g, or t

SEQ ID NO: 214136 - DNA, 260 bp, Canis familiaris; identical to SEQ ID NO: 4029
  misc_feature (19)..(19): n is a, c, g, or t
  misc_feature (27)..(27): n is a, c, g, or t
  misc_feature (41)..(41): n is a, c, g, or t
  misc_feature (53)..(53): n is a, c, g, or t
  misc_feature (75)..(75): n is a, c, g, or t
  misc_feature (108)..(109): n is a, c, g, or t

SEQ ID NO: 214137 - DNA, 500 bp, Canis familiaris; identical to SEQ ID NO: 4030
  misc_feature (270)..(270): n is a, c, g, or t
  misc_feature (276)..(276): n is a, c, g, or t

SEQ ID NO: 214138 - DNA, 724 bp, Canis familiaris; identical to SEQ ID NO: 4031
  misc_feature (38)..(38): n is a, c, g, or t

SEQ ID NO: 214139 - DNA, 289 bp, Canis familiaris; identical to SEQ ID NO: 4032
  misc_feature (153)..(153): n is a, c, g, or t
  misc_feature (160)..(160): n is a, c, g, or t
  misc_feature (195)..(195): n is a, c, g, or t
  misc_feature (198)..(199): n is a, c, g, or t
  misc_feature (215)..(215): n is a, c, g, or t
  misc_feature (220)..(220): n is a, c, g, or t
  misc_feature (224)..(224): n is a, c, g, or t
  misc_feature (235)..(236): n is a, c, g, or t
  misc_feature (240)..(240): n is a, c, g, or t
  misc_feature (246)..(246): n is a, c, g, or t
  misc_feature (251)..(251): n is a, c, g, or t
  misc_feature (260)..(260): n is a, c, g, or t

SEQ ID NO: 214140 - DNA, 339 bp, Canis familiaris; identical to SEQ ID NO: 4033
  misc_feature (17)..(17): n is a, c, g, or t
  misc_feature (26)..(26): n is a, c, g, or t
  misc_feature (69)..(69): n is a, c, g, or t
  misc_feature (85)..(85): n is a, c, g, or t
  misc_feature (115)..(115): n is a, c, g, or t
  misc_feature (154)..(154): n is a, c, g, or t
  misc_feature (159)..(160): n is a, c, g, or t
  misc_feature (171)..(171): n is a, c, g, or t
  misc_feature (327)..(327): n is a, c, g, or t

SEQ ID NO: 214141 - DNA, 424 bp, Canis familiaris; identical to SEQ ID NO: 4034

SEQ ID NO: 214142 - DNA, 453 bp, Canis familiaris; identical to SEQ ID NO: 4035
  misc_feature (241)..(241): n is a, c, g, or t
  misc_feature (287)..(287): n is a, c, g, or t

SEQ ID NO: 214143 - DNA, 408 bp, Canis familiaris; identical to SEQ ID NO: 4036
  misc_feature (125)..(125): n is a, c, g, or t
  misc_feature (186)..(186): n is a, c, g, or t
  misc_feature (208)..(208): n is a, c, g, or t
  misc_feature (238)..(238): n is a, c, g, or t
  misc_feature (262)..(262): n is a, c, g, or t
  misc_feature (279)..(279): n is a, c, g, or t
  misc_feature (354)..(354): n is a, c, g, or t
  misc_feature (372)..(372): n is a, c, g, or t
  misc_feature (388)..(388): n is a, c, g, or t

SEQ ID NO: 214144 - DNA, 448 bp, Canis familiaris; identical to SEQ ID NO: 4037
  misc_feature (419)..(419): n is a, c, g, or t

SEQ ID NO: 214145 - DNA, 600 bp, Canis familiaris
ttcagcttgtgtttgcaagttgamcagtgaacatttagatttttaaactccttgggggaaagcaggggttagctgagttggcaaagtcagaggataaaaggccacctgccatctcataaacaagacaaaaaaagtctttctttccttactttcttggctacttccatcctgcagggagcagcagatgttcagcctgaaataaaaggtgtcagakwtgcatacacacacacacacacacacacacacacacacacataggcaggagtcaatttatgcacattccttgagaataaaamactacctagggtgyattcacctagaatcctcaaacctgccctactggtgttactcaggtccctacattccccactgcacttctgatggttgtttaagctaccatcaaagtctggagcctgccctcaagttctcctgtagactagggtaacagaacccaccctcttgacaaggttctgtgacatgaagatgatgttgctgctgctaatagtataatagctcctgtgaacaaagctatatggtaagcactttacaaacattgccttctgttactattatagtattcttggagattaattgctaagt

SEQ ID NO: 214146 - DNA, 206 bp, Canis familiaris; identical to SEQ ID NO: 4039
  misc_feature (178)..(178): n is a, c, g, or t

SEQ ID NO: 214147 - DNA, 470 bp, Canis familiaris; identical to SEQ ID NO: 4040

SEQ ID NO: 214148 - DNA, 422 bp, Canis familiaris; identical to SEQ ID NO: 4041
  misc_feature (8)..(8): n is a, c, g, or t
  misc_feature (24)..(24): n is a, c, g, or t
  misc_feature (80)..(80): n is a, c, g, or t
  misc_feature (96)..(96): n is a, c, g, or t
  misc_feature (103)..(103): n is a, c, g, or t

SEQ ID NO: 214149 - DNA, 600 bp, Canis familiaris
  misc_feature (321)..(321): n is a, c, g, or t
ctgggtcttcacctttcctcatttacctccaagggaactggtgccatgtatcaaagcaggccacctgatgccaggcccactgatgcctccacctcctgacttgacatttgaaaagaaatacatttgtgtgtgtgtgtgtgtgtgtgtgtgtgttttamagatttatttatttattagagagagagagagagagagagactgamacatgggtgggaggggcagagggagagagaatctcamgcagactccacactgagtatggmgcccaacatggggcttgatcttaggaccctgagattctgacctgagctgaaaccaagngtcaagcctttaactgactgtgccactcaggcaccactacatttgtgttttaaatagtaacatgtccatgtggttcaaaatgcaaaacaataatggggacagtgaaaaggctttmtcccacccagcctctacctccatccacccgtcctcccacactgccccaaataggtaaccattcgtcctattttatagggtttgtgtgtaaagtttgaaaagcaaatagaaatatagatttttatctttccttaccttttatgtagaaaagggtcctctagagtc

SEQ ID NO: 214150 - DNA, 600 bp, Canis familiaris
tgctttctaaggagcctatcttaatctcgtcagccctatagagactagtctccaccgtatctcattacagggaaaggttccttaagaaaacaatgtaattcctaatgcttcttccaccagggcaaaaatcccaaagtactgcataataactagagttaacaattttgtactacatatatttgaaatttgcttagagagtagatattaaatgctctcaacacacacacacacacacacatacgtatacacgatgccaactatttgaggtgatggatgtgttaactgactttactgtggtgatcatttcacgatccaaatgtgtgtcaaatcatcacgtttaactttatatcattccatgtgtcaattatatctccatgaagctgggaaaaaaaattgtactttggaagcagagatctgttgggttcaaattcactgatttgcctctctctaatgcatcccatagttgagagtaacttgtttctggttgtgagctggtgttatcatcaggagatagtaaacacttagcatccatgctgtgaagcagcttgatgacactggggatgtgtgtctgtgtgactgctgcatggatctatgcatggg

SEQ ID NO: 214151 - DNA, 445 bp, Canis familiaris; identical to SEQ ID NO: 4044

SEQ ID NO: 214152 - DNA, 536 bp, Canis familiaris; identical to SEQ ID NO: 4045

SEQ ID NO: 214153 - DNA, 340 bp, Canis familiaris; identical to SEQ ID NO: 4046
  misc_feature (179)..(179): n is a, c, g, or t
  misc_feature (230)..(230): n is a, c, g, or t
  misc_feature (285)..(285): n is a, c, g, or t

SEQ ID NO: 214154 - DNA, 470 bp, Canis familiaris; identical to SEQ ID NO: 4047
  misc_feature (109)..(109): n is a, c, g, or t
  misc_feature (247)..(247): n is a, c, g, or t
  misc_feature (410)..(410): n is a, c, g, or t

SEQ ID NO: 214155 - DNA, 336 bp, Canis familiaris; identical to SEQ ID NO: 4048
  misc_feature (11)..(11): n is a, c, g, or t
  misc_feature (156)..(156): n is a, c, g, or t
  misc_feature (165)..(165): n is a, c, g, or t
  misc_feature (168)..(168): n is a, c, g, or t
  misc_feature (174)..(174): n is a, c, g, or t
  misc_feature (199)..(199): n is a, c, g, or t
  misc_feature (207)..(207): n is a, c, g, or t
  misc_feature (225)..(225): n is a, c, g, or t
  misc_feature (235)..(235): n is a, c, g, or t
  misc_feature (260)..(260): n is a, c, g, or t
  misc_feature (272)..(272): n is a, c, g, or t
  misc_feature (286)..(286): n is a, c, g, or t

SEQ ID NO: 214156 - DNA, 278 bp, Canis familiaris; identical to SEQ ID NO: 4049
  misc_feature (177)..(177): n is a, c, g, or t
  misc_feature (180)..(180): n is a, c, g, or t
  misc_feature (194)..(194): n is a, c, g, or t
  misc_feature (197)..(197): n is a, c, g, or t
  misc_feature (201)..(201): n is a, c, g, or t
  misc_feature (211)..(211): n is a, c, g, or t
  misc_feature (214)..(214): n is a, c, g, or t
  misc_feature (220)..(220): n is a, c, g, or t
  misc_feature (229)..(229): n is a, c, g, or t
  misc_feature (234)..(234): n is a, c, g, or t
  misc_feature (237)..(237): n is a, c, g, or t
  misc_feature (243)..(243): n is a, c, g, or t

SEQ ID NO: 214157 - DNA, 519 bp, Canis familiaris; identical to SEQ ID NO: 4050

SEQ ID NO: 214158 - DNA, 477 bp, Canis familiaris; identical to SEQ ID NO: 4051
  misc_feature (284)..(284): n is a, c, g, or t
  misc_feature (288)..(288): n is a, c, g, or t
  misc_feature (345)..(345): n is a, c, g, or t
  misc_feature (419)..(419): n is a, c, g, or t
  misc_feature (434)..(434): n is a, c, g, or t
  misc_feature (441)..(441): n is a, c, g, or t

SEQ ID NO: 214159 - DNA, 350 bp, Canis familiaris; identical to SEQ ID NO: 4052

SEQ ID NO: 214160 - DNA, 600 bp, Canis familiaris
ttttaaaaattccacattttgccaatttttatccttagggattttacctctttcatcaacctctcatatcttaataaaaccatccatttaaagaggcttggggtatttaaaggtctttctaaacagtaagaagttaagacatttctaagaactcactgtcagttctaagagaagtacaaacctgtttaacaacaacaaatatacacacacacacacacacacacctctatggaatatataatggttttatccccaaattttctcttttgaaggattaaagagatactcaaacccaacacatatgtgaactgttagtgaaaaatacaacttctataaagaaaggaaagctgccgaactactttttcaagtgaaacattttaggagattgctctaacctggggcacagtacattctctctatggcatcgctgtcacaggaatcttcaacctcactccacctgctaaaatacgttagctgaatgtgtcctwaaaacwaaacgacaggagaaatcaaaacatttttctcttccattttctgcagaagtgaactgtaattatccttttgtagctaaaaacagtatcattaagaataatggcatca

SEQ ID NO: 214161 - DNA, 330 bp, Canis familiaris; identical to SEQ ID NO: 4054
  misc_feature (9)..(9): n is a, c, g, or t
  misc_feature (11)..(11): n is a, c, g, or t
  misc_feature (30)..(30): n is a, c, g, or t
  misc_feature (101)..(101): n is a, c, g, or t
  misc_feature (105)..(105): n is a, c, g, or t
  misc_feature (135)..(135): n is a, c, g, or t
  misc_feature (163)..(163): n is a, c, g, or t
  misc_feature (176)..(176): n is a, c, g, or t
  misc_feature (227)..(227): n is a, c, g, or t

SEQ ID NO: 214162 - DNA, 600 bp, Canis familiaris
agtctgagcaaagagtaaatgggtcccaggtggcaggggaatcacagcagtaggaactgagggtccatgatgaatcgggggagccactgtacttagacctgtgtggcaggagaggtcattgagcaaggcctatgggcagcaggaatgtatgcggtgwggcacgcatgtgggtgyacgkrcacacacacacacacacacacacacacacacacacatgaatgccayyttcacggcaccacagacygcacagccacatgatgcccatgttgcatctaacagacaaggggcagawagcccacaaagggcgtttgtgaagtagataaagcagggcatgagytgtacatgaaaggtcacatgaaaaaaacaaaaaaccatgaaaaaacccaagggcttagccttctccttaatagaaacagaaataatgtaaccattcatcccctgctgcatgcactggctgccacatgaaccaaaacgacagccagagcagtccccgaagcccctgtccctgmtcacactccactggaagatgctgagcttcccaaagtcgacctgccctacacaccccgtcctgcctggtgggcaagtccttggaccccaccc

SEQ ID NO: 214163 - DNA, 600 bp, Canis familiaris
tcatataatggcagtcattggaaataatgaatttgaactatacctgtagacttggagggaatttttcacaagacatggttgaaacagaaatgcatagttcaaagcaagtgtttatgaatyccattttgtgacatagcattatttaacataacattaaccctccctctatgtatacttgagtatttgtgtgtgtgtgtgtgtgtgtgtgtgtgtgtgtgtgtatacatacaaaactactaaattgctaacatgatttggggatatggtatagtgtgagcatgccttctgagaatctctactttcccaccttctttgccttcttttctcacacttaccctctccatgacctggaaggctcattcccagtggcttgtcttggaggctaaatctgctggttccaagctgtgcggcaaaggcagtctgcttaggggtggggttgggtagtgatggggaggaattaaagaaacattccaaatactcataagtgtacagtaatgataataatattgttagaatggtggcttgtagcaattagtgtgcctacaaaagaccagcatccatacgttaacttgtcttttgataatctggatgattaataga

SEQ ID NO: 214164 - DNA, 420 bp, Canis familiaris; identical to SEQ ID NO: 4057
  misc_feature (395)..(395): n is a, c, g, or t
  misc_feature (410)..(410): n is a, c, g, or t

SEQ ID NO: 214165 - DNA, 600 bp, Canis familiaris
ctacccacattgacgcaaatggwaggtattcaattcatcctttctaatggctgagtaatatcccattatatacatacacacacagacacacacacacacacacacacaccatatcttctttatccatwcatttttcgatgggcactgaggctccttccacagtttggctattgtggacattgctgctagaaacattggggtgcaggtgtcccggtgtttcactgcatctgtatctttgggtaaatccccaaacagtgcaattgctgggtcgtagggtagctccatttttaactctttggaggaacctccacacagttttccagagtggctgcaccagttcacattcccaccwacagtgcaaggggtcccctttctccacatcctgtccattatttgttgttttctgtcttgttaattttccccattctcactggtgtgaggtggtatctcattgtggttttgatttgcatttccctgatgacaagtgatatggagcattttctcatgtgcttgttggccatgtctatgtcttctttgatgaaatttctgttcatgtctttggctcatttcatgattggattgtttgttctttgctgttga

SEQ ID NO: 214166 - DNA, 334 bp, Canis familiaris; identical to SEQ ID NO: 4059
  misc_feature (241)..(241): n is a, c, g, or t

SEQ ID NO: 214167 - DNA, 826 bp, Canis familiaris; identical to SEQ ID NO: 4060

SEQ ID NO: 214168 - DNA, 600 bp, Canis familiaris
  misc_feature (554)..(554): n is a, c, g, or t
aaagaatattgacaacttttttcccccctccaagaaatattttgtatttttctttcttttgaaaattgaaccatccttaagtagtgatatacagatggtttggttaaaaggcagtgtagtgtcagttaaggtctcgtttttcagagctagaatgttaaatgggctttttctctctatacatatttgtgtgtgtgtgtgtgtgtgtgtgtgtgtgtgtgtgtgtgaagaaatggttwcattggmgctaaaaaaatcaaaatgccctcttgtttcagtgagacatcgtgacacacacctgttgcattttcttacgcaggtttaaggcttgattttatgtagttaatttattttctgattcattgtttatacattttttatttccacatttttttccttaaattcctgcttgaagggacaataaaatcataatttgaggtcaagtaataatagctatattttcacttatcagggggttgggattttcctggaacgtgactggatgaaacatttagaagtagaaatgtcaattgctgtttggagtttagtatagtttncaagggaattattccagkgccgtgcatgtacccatgtttgtgtata

SEQ ID NO: 214169 - DNA, 413 bp, Canis familiaris; identical to SEQ ID NO: 4062
  misc_feature (52)..(52): n is a, c, g, or t
  misc_feature (211)..(211): n is a, c, g, or t
  misc_feature (224)..(224): n is a, c, g, or t
  misc_feature (231)..(231): n is a, c, g, or t
  misc_feature (248)..(249): n is a, c, g, or t
  misc_feature (257)..(257): n is a, c, g, or t
  misc_feature (333)..(334): n is a, c, g, or t
  misc_feature (389)..(389): n is a, c, g, or t

SEQ ID NO: 214170 - DNA, 600 bp, Canis familiaris
ctagaaaggaactgatagaaaaaaacccttcttctaccagacataagatgctcgccccatgcttgtaggatatcactgtaggtacagctaaatttaacaattgttaatcacaggaataagtcatccacggttgaagaactagttttataaatatwtgggacatwtataatctgtaatagaactttctattaagtgtgtgtgtgtgtgtgtgtgtgtgtgtgtgtgtgtgtgtgtgtgtgcatwcatagttcattttatgttttcaagttcccaagggcaggawatccacattcattttgacaggtgatttctagctccaavtcacaaggacmcatttgcctacatttamtcttcaaactggsttttgtgggctattttctctagttctttccaaacttagtctcggtccttgcattcactctctacagaggsagactgagtcgctattcctgcyacacactacactcctgttagctggaaaatcccctggggtgagggggcctatctcattccccaatggttccagaaacattatcaattgacaatacacaaccagttgcacagagaaagaggttttaaagcctcgtttttgtcctctag

SEQ ID NO: 214171 - DNA, 959 bp, Canis familiaris; identical to SEQ ID NO: 4064

SEQ ID NO: 214172 - DNA, 371 bp, Canis familiaris; identical to SEQ ID NO: 4065
  misc_feature (40)..(40): n is a, c, g, or t
  misc_feature (48)..(48): n is a, c, g, or t
  misc_feature (89)..(89): n is a, c, g, or t
  misc_feature (129)..(129): n is a, c, g, or t
  misc_feature (155)..(155): n is a, c, g, or t
  misc_feature (174)..(174): n is a, c, g, or t
  misc_feature (187)..(187): n is a, c, g, or t
  misc_feature (197)..(197): n is a, c, g, or t
  misc_feature (203)..(203): n is a, c, g, or t
  misc_feature (235)..(235): n is a, c, g, or t
  misc_feature (248)..(248): n is a, c, g, or t
  misc_feature (254)..(254): n is a, c, g, or t
  misc_feature (363)..(363): n is a, c, g, or t

SEQ ID NO: 214173 - DNA, 600 bp, Canis familiaris
agccaaaatttggaaacagcccagatgtccaacaacagatgaatggataaagaagatrtggggtgtgtgtgtgtgtgtgtgtgtatagttgttctatgtgtgcatatacatatacatatatcgtgtgtatattgtgtatatgcacacaatagaacattactcagccatcaaaaagaaagaactcttatcatttgtaacaatgtgaatagaactagagtattaggctaagtgaaaaaagtcagtcagagaaagacaaatgtcatatgacctcattcatatgtggaatttaagaaacaaaacagatgaacatatgggaagggaaggaaaaataaacagaaaaacaggcaaaccataagagactcttaattctaggaaactgagggttgctggaggggaaggagatggggaatggggtaacaggatgatggacattaaagggcacatgatgtaatgagaactgttataagcaactgatgaatcattaaattctacccctgaaactaataatactctatatgttaactaaattgaatttaaattaaaaaaaaatttttaaatgtcatccagggctgcagtcatctgaaggcttaactaagactg

SEQ ID NO: 214174 - DNA, 460 bp, Canis familiaris; identical to SEQ ID NO: 4067
  misc_feature (42)..(42): n is a, c, g, or t
  misc_feature (76)..(76): n is a, c, g, or t
  misc_feature (152)..(152): n is a, c, g, or t
  misc_feature (160)..(160): n is a, c, g, or t
  misc_feature (169)..(169): n is a, c, g, or t
  misc_feature (178)..(178): n is a, c, g, or t
  misc_feature (189)..(189): n is a, c, g, or t
  misc_feature (263)..(263): n is a, c, g, or t
  misc_feature (275)..(275): n is a, c, g, or t
  misc_feature (278)..(279): n is a, c, g, or t
  misc_feature (284)..(284): n is a, c, g, or t
  misc_feature (406)..(406): n is a, c, g, or t

SEQ ID NO: 214175 - DNA, 440 bp, Canis familiaris; identical to SEQ ID NO: 4068
  misc_feature (243)..(243): n is a, c, g, or t

SEQ ID NO: 214176 - DNA, 440 bp, Canis familiaris; identical to SEQ ID NO: 4069

SEQ ID NO: 214177 - DNA, 421 bp, Canis familiaris; identical to SEQ ID NO: 4070
  misc_feature (403)..(403): n is a, c, g, or t

SEQ ID NO: 214178 - DNA, 300 bp, Canis familiaris; identical to SEQ ID NO: 4071
  misc_feature (127)..(127): n is a, c, g, or t
  misc_feature (130)..(130): n is a, c, g, or t
  misc_feature (143)..(143): n is a, c, g, or t
  misc_feature (165)..(165): n is a, c, g, or t
  misc_feature (199)..(199): n is a, c, g, or t
  misc_feature (225)..(225): n is a, c, g, or t

SEQ ID NO: 214179 - DNA, 600 bp, Canis familiaris
caaaaaagaaggaactttgacgggggccgggcagaagagaacccagatgtccctgcagggtgcccaagtctcttctggaaggtctttagagacaggctttaacctgcctgcaaccaaggggaggtttgkgagaggagccaaacactgtcattagagctgctgctgaatgtttcccmagggtttctytgtgtgcccctcagagcggatggtgtcacasgaagtgtgtkctgagtgtgtgtgtgtgtgtgtgtgtgtgtgtgtgtgtgtgcgcctgatagagaccagctgtaagggcgttgtccctctatataagagacaagtggagttgatggggctgtggcmgagsggatgtatgagaggctggagcagtgtggctccatggccctgcssagtcatgccctggacycagagagtaccatttctggggtggccccagcccagtttctaggagcagacccttggggatggtggacgaagggatggaagggaagggaggagtcagacctgttctatagaggaagaagcagggcgggttctgcgtaggactttgtccagtcatgtggaggaggaggagccagcagagcytggcagttgctaggt

SEQ ID NO: 214180 - DNA, 600 bp, Canis familiaris
ccatttttggytcacttttagaaawgtcatcagatgtagagggcaggwttccccaaaastggattcccaaattgtgccaytctcatctcccaaacgccacagagatggggcccagstgacggsagycctcttccagcctgaccaggcagctccaggcccacccaccacaaacccggsctctgtcckcgctgccagacctgtgggctgggccagcagcctcacttccttttgagatgacaaaggctgcatccctctgacacagatgacactgtgagcggacagtacttctctgccagggacccccccgtacccctggctcggtctcggctacagccaaagggcaggccatggccacggctcctctccttgtcccaccctgccccacctcactccaggatgcagacacctccaaaccaagctgtccttcggaaaaggctcattctgctagtgtggcatcttcttagaagcaggaaggataatgaagttattattaaaaggacttttctattttcttcaaggagaaaatacatgtaagaagttttagcaagtttcaggacaaatacaagtcctttttttctccccaaatcattacatcccacg

SEQ ID NO: 214181 - DNA, 417 bp, Canis familiaris; identical to SEQ ID NO: 4074
  misc_feature (357)..(357): n is a, c, g, or t

SEQ ID NO: 214182 - DNA, 600 bp, Canis familiaris
tatgcacacatcacctcacacacacacaccatatgcacacacactttcatatatacatgctactccacadadatatacaccagacgtgtgctacccacacacacgtatcctacatgccatatgcacataccacctcacacacawatacacacacatgctcacagcacacacacacacacacacatctgcaccaccccacacataccatcctccacacactctgaccccagtcagacctatgcctttctctccacacccatggggctaaaggagtctatcaacagatatgattggaaggggcagccccagggtagttacccaaaccctgcctttatgccgggataaatcaggtgagtacagtgcatggctaaaccaggagcatgcgcggggggacggaatcttgcagccatctcaggagcctctcaagagcagagagacccagcctagaacaaccccacatccacgctgctggcagagactgtcttcatacccgagaggaagcaagtaggagtcccctaggagacgctattttacaagtaccagaagagatgcctgcgtggctcagtcagttaagtgtccgactcttgatttcagctcaag

SEQ ID NO: 214183 - DNA, 600 bp, Canis familiaris
atagtacatcttgaatatcactatgtatcagtatatacagagctgttgcattctttttaatagttatatgttattctactcaaaatgtgtattaaaaacttacttaaccacctccactggcagacatttagggtgtttccaaactcttaccactataaggaatgttgcaatggatatatttctgtgtgtgtgtgtgtgtgtgtgtgtgtgtatgtatttgcaatccacattcttgaccacattattttgtaacataggaacttatatgtgaaatttgaagagacttgctacactgawagttatatgcatttattcttatttttttaagttttattttttaatttaagtaatctctatagtcagtgtggggcttgaactcacgacctcgagataaagaatcccatgctcttctgactgagtcagctaggcacccggaaagttatatgcatttaaaatgacagatgttctcattcaccacagaggtactaccttataggtactaatttgagagtaacataattcttatgaaattaaatactgtggacatattcatggttccccaaatcgtatcataagtctcttttaagcttattatcttga

SEQ ID NO: 214184 - DNA, 500 bp, Canis familiaris; identical to SEQ ID NO: 4077
  misc_feature (49)..(49): n is a, c, g, or t
  misc_feature (439)..(439): n is a, c, g, or t
  misc_feature (446)..(446): n is a, c, g, or t
  misc_feature (450)..(450): n is a, c, g, or t

SEQ ID NO: 214185 - DNA, 370 bp, Canis familiaris; identical to SEQ ID NO: 4078

SEQ ID NO: 214186 - DNA, 590 bp, Canis familiaris; identical to SEQ ID NO: 4079
  misc_feature (37)..(37): n is a, c, g, or t

SEQ ID NO: 214187 - DNA, 340 bp, Canis familiaris; identical to SEQ ID NO: 4080
  misc_feature (35)..(35): n is a, c, g, or t
  misc_feature (70)..(70): n is a, c, g, or t
  misc_feature (88)..(88): n is a, c, g, or t
  misc_feature (206)..(206): n is a, c, g, or t
  misc_feature (210)..(210): n is a, c, g, or t
  misc_feature (284)..(284): n is a, c, g, or t
  misc_feature (298)..(298): n is a, c, g, or t

SEQ ID NO: 214188 - DNA, 399 bp, Canis familiaris; identical to SEQ ID NO: 4081
  misc_feature (50)..(50): n is a, c, g, or t
  misc_feature (59)..(59): n is a, c, g, or t
  misc_feature (78)..(78): n is a, c, g, or t
  misc_feature (112)..(112): n is a, c, g, or t
  misc_feature (160)..(160): n is a, c, g, or t

SEQ ID NO: 214189 - DNA, 580 bp, Canis familiaris; identical to SEQ ID NO: 4082

SEQ ID NO: 214190 - DNA, 470 bp, Canis familiaris; identical to SEQ ID NO: 4083

SEQ ID NO: 214191 - DNA, 180 bp, Canis familiaris; identical to SEQ ID NO: 4084
  misc_feature (32)..(32): n is a, c, g, or t
  misc_feature (103)..(103): n is a, c, g, or t
  misc_feature (175)..(175): n is a, c, g, or t

SEQ ID NO: 214192 - DNA, 450 bp, Canis familiaris; identical to SEQ ID NO: 4085
  misc_feature (370)..(370): n is a, c, g, or t

SEQ ID NO: 214193 - DNA, 214 bp, Canis familiaris; identical to SEQ ID NO: 4086
  misc_feature (28)..(28): n is a, c, g, or t
  misc_feature (111)..(111): n is a, c, g, or t
  misc_feature (121)..(121): n is a, c, g, or t
  misc_feature (160)..(161): n is a, c, g, or t
  misc_feature (163)..(163): n is a, c, g, or t
  misc_feature (177)..(177): n is a, c, g, or t
  misc_feature (184)..(184): n is a, c, g, or t
  misc_feature (193)..(193): n is a, c, g, or t
  misc_feature (197)..(197): n is a, c, g, or t

SEQ ID NO: 214194 - DNA, 500 bp, Canis familiaris; identical to SEQ ID NO: 4087
  misc_feature (151)..(151): n is a, c, g, or t
  misc_feature (160)..(160): n is a, c, g, or t

SEQ ID NO: 214195 - DNA, 600 bp, Canis familiaris
atcagttttagagtttcttgacttcctgccaggaacagaagaatccactactctgattatttatttcctgtttatttctttaaagatgtaattagaktggaratcattcacacacacacacacacacacacacacacacattctagtacamgcataccttaragagattgctggytctgttccagaccagcacaatagagtgagtattataagtgagttatgaattttggtttcctactgcatataaaagttatccttaggggtgcctgcgtggctcagtcggttaagtgcctgactcttggtttgggctcaggtcatgggtgtgagatggagccccacatggggcttcctgctcagtgaggagtctgcttgagattctctctctgcccctccccccacgtgcatgctttctgtctctctaaagtaaataatctttaaaaaagttatctgaacactgtattgcagtctattaagtaagcaatgatattatgtctaaagagacaatgtacatatcttagtttttaaaatgctttgttactggggcacctggtggctcagtggttgagtgtctgcctttgtcttaggttgtgatcctctaga

SEQ ID NO: 214196 - DNA, 214 bp, Canis familiaris; identical to SEQ ID NO: 4089
  misc_feature (14)..(14): n is a, c, g, or t
  misc_feature (99)..(99): n is a, c, g, or t
  misc_feature (109)..(109): n is a, c, g, or t
  misc_feature (113)..(113): n is a, c, g, or t
  misc_feature (205)..(205): n is a, c, g, or t

SEQ ID NO: 214197 - DNA, 600 bp, Canis familiaris
mcttgtdgcttagggrcagtacttgcctttggdgyaaccytcttccacttgctcaacctccatcccttctggasagtggmmggagtgasacagcaatgcctggagagtgtgtggsacccaaaccctttattctcattttaatttggctgtgagtcacaatgcragamgsmagtyctcccccaaaattcaatcgcatgtccatagaagataaactggaggattatcttcatccagacttgaaccatggccatttctgaagagwtggyctctatgcgatgtttcccttttatttattttcatgtcttaagaattgaccaatatcttttgtcttwtaaagaagcaaggttgccattctagagtggcmatttttttttkggagtggcaaaatttttttaktgaattaagaaccattgggaattgtgactgayacattgkactagcacatatgkatgtgtgtgtgtgtgtgtgtgtgtgtgtgtgwattwacttatttaacctaatgacgacctmgggctgtgataagcagtctttgatgaacagaactaaaaagggctstatkaaghtcagagaagaarkgcagmcaattcagttgtatatgat

SEQ ID NO: 214198 - DNA, 600 bp, Canis familiaris
gccccscgmkrgagcattctgagctggactggtcctaggggraaatcaagggctagttctaatctcattttcaggtaggsraagggtrgagaagtgactttctggggcaggctcttgaaaaacaggcataaacagggaacaatgggaccattcctttctgacctactcaacctggtgcttgatacgaaatgagtatggratgtgtgtgtgtgcgtgctgckacgbggtgtgtgtgtgtgtgtgtgtgtgagagagagagagagagagagataagtataaccttgagamccctcttaggagsgtaaagcktgccamcaaatcccccctgcatagggatggatttgcccctttttttcttataaaaacctgttttctgagtgccatacaaaaagtggttcagtggtgccaccgtgagcttcagggctccttgatgactacctaatccccaccccccaactcccctctgccccacctcctgccacccaaagctctttaactcaaacctaaaagttacagaacagggctggggagacactgggagagtgggagacaatggggtgaccgctggctgaagacccacagcctgggaaggtggaagtg

SEQ ID NO: 214199 - DNA, 430 bp, Canis familiaris; identical to SEQ ID NO: 4092
  misc_feature (23)..(25): n is a, c, g, or t
  misc_feature (177)..(177): n is a, c, g, or t
  misc_feature (182)..(182): n is a, c, g, or t
  misc_feature (212)..(212): n is a, c, g, or t
  misc_feature (281)..(281): n is a, c, g, or t
  misc_feature (326)..(326): n is a, c, g, or t
  misc_feature (345)..(345): n is a, c, g, or t

SEQ ID NO: 214200 - DNA, 330 bp, Canis familiaris; identical to SEQ ID NO: 4093
  misc_feature (13)..(13): n is a, c, g, or t
  misc_feature (17)..(17): n is a, c, g, or t
  misc_feature (24)..(24): n is a, c, g, or t
  misc_feature (34)..(34): n is a, c, g, or t

SEQ ID NO: 214201 - DNA, 300 bp, Canis familiaris; identical to SEQ ID NO: 4094

SEQ ID NO: 214202 - DNA, 515 bp, Canis familiaris; identical to SEQ ID NO: 4095

SEQ ID NO: 214203 - DNA, 408 bp, Canis familiaris; identical to SEQ ID NO: 4096

SEQ ID NO: 214204 - DNA, 600 bp, Canis familiaris
atacctgttaaagagcccaggatgctgtttctaggttacttgaggattttttccccagctcttcacttagaatgagtcttaggtcataaatagaactcagctccttttctgtttcttgatgccttcagagactcattttctataktctgtagtgaaaaaaaaagtggctttttgamaaaaagatggagtgggggaaaaatagggtaaagcccamatcaacctgcctgaataaaagacctttgtcataaatgagagatrtttcagcagcttcaagagcagatatgwgtgaccgtcttgggggatgtatgtgtgtgtgtgtgtgtgtgtgtgtgagagagagagagagagagagagagtgagtttagtaggaakatsttcccagcatgtccagacacgtaagtgggacaagacaaagtgtggaactgaccactgacttatgaaaggttaaaacattagaattttgttcccaaggtctcctgctgtgcccaaacwatcccagttgctacaaaagacactacttatgattctatacatcttttctttatatgacttctcattaagtattcttacytagacttatttttawgttcaattagtatt

SEQ ID NO: 214205 - DNA, 282 bp, Canis familiaris; identical to SEQ ID NO: 4098

SEQ ID NO: 214206 - DNA, 191 bp, Canis familiaris; identical to SEQ ID NO: 4099

SEQ ID NO: 214207 - DNA, 480 bp, Canis familiaris; identical to SEQ ID NO: 4100

SEQ ID NO: 214208 - DNA, 600 bp, Canis familiaris
cagctttctccacagccaccgctgccatcgtcatcggagccagtaatttctataggcaccgcttttatttgagagacttcatctgtgatgtctcctcgaaggcctggtcctgggcccccctgagccctagcactccaagcccagaagaagccacaaggctgcacctgtgtctctcctatctgagcatgctggaggccctgttcataagctttcaggtcatgctgttgggtatctgggttctgctgctcctggcatctctggttcccctgtgtctgttctgctggagtaggtcccgacataagaaaatagaccagaagaaactgctggaagcaaatggaatctagccttgcttctcctaagtgctcatgcctggactctttctggactgcctctggctcctgggagaaggatcaggctggggaaaagagactctacgctagctccagttaccttcctccactgccaacagccacagccatggccagagtcccctccaccaatcatcacaccactcttgcccatttctggctcacctttaccattccgccttgcctcgtggcccctcatgagcaatgaagacaaaaaactgtcttgtttctc

SEQ ID NO: 214209 - DNA, 363 bp, Canis familiaris; identical to SEQ ID NO: 4102

SEQ ID NO: 214210 - DNA, 676 bp, Canis familiaris; identical to SEQ ID NO: 4103

SEQ ID NO: 214211 - DNA, 249 bp, Canis familiaris; identical to SEQ ID NO: 4104

SEQ ID NO: 214212 - DNA, 475 bp, Canis familiaris; identical to SEQ ID NO: 4105
  misc_feature (289)..(289): n is a, c, g, or t

SEQ ID NO: 214213 - DNA, 437 bp, Canis familiaris; identical to SEQ ID NO: 4106

SEQ ID NO: 214214 - DNA, 197 bp, Canis familiaris; identical to SEQ ID NO: 4107

SEQ ID NO: 214215 - DNA, 242 bp, Canis familiaris; identical to SEQ ID NO: 4108

SEQ ID NO: 214216 - DNA, 195 bp, Canis familiaris; identical to SEQ ID NO: 4109

SEQ ID NO: 214217 - DNA, 188 bp, Canis familiaris; identical to SEQ ID NO: 4110

SEQ ID NO: 214218 - DNA, 320 bp, Canis familiaris; identical to SEQ ID NO: 4111
  misc_feature (53)..(53): n is a, c, g, or t
  misc_feature (56)..(56): n is a, c, g, or t

SEQ ID NO: 214219 - DNA, 393 bp, Canis familiaris; identical to SEQ ID NO: 4112

SEQ ID NO: 214220 - DNA, 427 bp, Canis familiaris; identical to SEQ ID NO: 4113

SEQ ID NO: 214221 - DNA, 132 bp, Canis familiaris; identical to SEQ ID NO: 4114

SEQ ID NO: 214222 - DNA, 168 bp, Canis familiaris; identical to SEQ ID NO: 4115

SEQ ID NO: 214223 - DNA, 394 bp, Canis familiaris; identical to SEQ ID NO: 4116

SEQ ID NO: 214224 - DNA, 392 bp, Canis familiaris; identical to SEQ ID NO: 4117

SEQ ID NO: 214225 - DNA, 175 bp, Canis familiaris; identical to SEQ ID NO: 4118
  misc_feature (33)..(33): n is a, c, g, or t
  misc_feature (36)..(36): n is a, c, g, or t

SEQ ID NO: 214226 - DNA, 409 bp, Canis familiaris; identical to SEQ ID NO: 4119

SEQ ID NO: 214227 - DNA, 358 bp, Canis familiaris; identical to SEQ ID NO: 4120

SEQ ID NO: 214228 - DNA, 324 bp, Canis familiaris; identical to SEQ ID NO: 4121
  misc_feature (26)..(28): n is a, c, g, or t
  misc_feature (58)..(58): n is a, c, g, or t
  misc_feature (87)..(87): n is a, c, g, or t
  misc_feature (115)..(115): n is a, c, g, or t

SEQ ID NO: 214229 - DNA, 321 bp, Canis familiaris; identical to SEQ ID NO: 4122

SEQ ID NO: 214230 - DNA, 233 bp, Canis familiaris; identical to SEQ ID NO: 4123
  misc_feature (122)..(122): n is a, c, g, or t

SEQ ID NO: 214231 - DNA, 399 bp, Canis familiaris; identical to SEQ ID NO: 4124

SEQ ID NO: 214232 - DNA, 283 bp, Canis familiaris; identical to SEQ ID NO: 4125
  misc_feature (14)..(14): n is a, c, g, or t

SEQ ID NO: 214233 - DNA, 269 bp, Canis familiaris; identical to SEQ ID NO: 4126

SEQ ID NO: 214234 - DNA, 317 bp, Canis familiaris; identical to SEQ ID NO: 4127
  misc_feature (8)..(10): n is a, c, g, or t
  misc_feature (12)..(12): n is a, c, g, or t
  misc_feature (22)..(26): n is a, c, g, or t
  misc_feature (28)..(28): n is a, c, g, or t
  misc_feature (47)..(49): n is a, c, g, or t
  misc_feature (56)..(58): n is a, c, g, or t
  misc_feature (61)..(61): n is a, c, g, or t
  misc_feature (64)..(64): n is a, c, g, or t
  misc_feature (71)..(72): n is a, c, g, or t
  misc_feature (76)..(76): n is a, c, g, or t
  misc_feature (81)..(82): n is a, c, g, or t
  misc_feature (87)..(87): n is a, c, g, or t

SEQ ID NO: 214235 - DNA, 207 bp, Canis familiaris; identical to SEQ ID NO: 4128
  misc_feature (27)..(32): n is a, c, g, or t
  misc_feature (35)..(35): n is a, c, g, or t
  misc_feature (56)..(56): n is a, c, g, or t
  misc_feature (64)..(66): n is a, c, g, or t
  misc_feature (72)..(72): n is a, c, g, or t
  misc_feature (203)..(203): n is a, c, g, or t

SEQ ID NO: 214236 - DNA, 136 bp, Canis familiaris; identical to SEQ ID NO: 4129

SEQ ID NO: 214237 - DNA, 333 bp, Canis familiaris; identical to SEQ ID NO: 4130

SEQ ID NO: 214238 - DNA, 186 bp, Canis familiaris; identical to SEQ ID NO: 4131

SEQ ID NO: 214239 - DNA, 390 bp, Canis familiaris; identical to SEQ ID NO: 4132

SEQ ID NO: 214240 - DNA, 278 bp, Canis familiaris; identical to SEQ ID NO: 4133
  misc_feature (5)..(7): n is a, c, g, or t
  misc_feature (11)..(11): n is a, c, g, or t
  misc_feature (38)..(38): n is a, c, g, or t
  misc_feature (65)..(65): n is a, c, g, or t
  misc_feature (69)..(69): n is a, c, g, or t

SEQ ID NO: 214241 - DNA, 439 bp, Canis familiaris; identical to SEQ ID NO: 4134
  misc_feature (7)..(7): n is a, c, g, or t
  misc_feature (18)..(22): n is a, c, g, or t
  misc_feature (24)..(24): n is a, c, g, or t
  misc_feature (41)..(43): n is a, c, g, or t
  misc_feature (50)..(53): n is a, c, g, or t
  misc_feature (58)..(59): n is a, c, g, or t
  misc_feature (65)..(67): n is a, c, g, or t
  misc_feature (198)..(198): n is a, c, g, or t

SEQ ID NO: 214242 - DNA, 178 bp, Canis familiaris; identical to SEQ ID NO: 4135
  misc_feature (88)..(88): n is a, c, g, or t
  misc_feature (90)..(91): n is a, c, g, or t

SEQ ID NO: 214243 - DNA, 433 bp, Canis familiaris; identical to SEQ ID NO: 4136

SEQ ID NO: 214244 - DNA, 426 bp, Canis familiaris; identical to SEQ ID NO: 4137

SEQ ID NO: 214245 - DNA, 163 bp, Canis familiaris; identical to SEQ ID NO: 4138
  misc_feature (127)..(127): n is a, c, g, or t

SEQ ID NO: 214246 - DNA, 251 bp, Canis familiaris; identical to SEQ ID NO: 4139

SEQ ID NO: 214247 - DNA, 400 bp, Canis familiaris; identical to SEQ ID NO: 4140

SEQ ID NO: 214248 - DNA, 398 bp, Canis familiaris; identical to SEQ ID NO: 4141

SEQ ID NO: 214249 - DNA, 219 bp, Canis familiaris; identical to SEQ ID NO: 4142

SEQ ID NO: 214250 - DNA, 235 bp, Canis familiaris; identical to SEQ ID NO: 4143
  misc_feature (6)..(9): n is a, c, g, or t
  misc_feature (11)..(11): n is a, c, g, or t
  misc_feature (39)..(41): n is a, c, g, or t
  misc_feature (47)..(47): n is a, c, g, or t
  misc_feature (52)..(52): n is a, c, g, or t
  misc_feature (54)..(54): n is a, c, g, or t
  misc_feature (80)..(82): n is a, c, g, or t
  misc_feature (180)..(180): n is a, c, g, or t
  misc_feature (183)..(183): n is a, c, g, or t

SEQ ID NO: 214251 - DNA, 237 bp, Canis familiaris; identical to SEQ ID NO: 4144

SEQ ID NO: 214252 - DNA, 245 bp, Canis familiaris; identical to SEQ ID NO: 4145
  misc_feature (119)..(119): n is a, c, g, or t

SEQ ID NO: 214253 - DNA, 187 bp, Canis familiaris; identical to SEQ ID NO: 4146
  misc_feature (14)..(14): n is a, c, g, or t
  misc_feature (17)..(17): n is a, c, g, or t
  misc_feature (21)..(21): n is a, c, g, or t

SEQ ID NO: 214254 - DNA, 350 bp, Canis familiaris; identical to SEQ ID NO: 4147
  misc_feature (258)..(258): n is a, c, g, or t
  misc_feature (329)..(329): n is a, c, g, or t
  misc_feature (341)..(341): n is a, c, g, or t

SEQ ID NO: 214255 - DNA, 246 bp, Canis familiaris; identical to SEQ ID NO: 4148
  misc_feature (100)..(100): n is a, c, g, or t
  misc_feature (214)..(214): n is a, c, g, or t

SEQ ID NO: 214256 - DNA, 258 bp, Canis familiaris; identical to SEQ ID NO: 4149
  misc_feature (225)..(225): n is a, c, g, or t
  misc_feature (229)..(230): n is a, c, g, or t
  misc_feature (236)..(236): n is a, c, g, or t

SEQ ID NO: 214257 - DNA, 420 bp, Canis familiaris; identical to SEQ ID NO: 4150

SEQ ID NO: 214258 - DNA, 399 bp, Canis familiaris; identical to SEQ ID NO: 4151

SEQ ID NO: 214259 - DNA, 393 bp, Canis familiaris; identical to SEQ ID NO: 4152

SEQ ID NO: 214260 - DNA, 215 bp, Canis familiaris; identical to SEQ ID NO: 4153

SEQ ID NO: 214261 - DNA, 372 bp, Canis familiaris; identical to SEQ ID NO: 4154

SEQ ID NO: 214262 - DNA, 526 bp, Canis familiaris; identical to SEQ ID NO: 4155
  misc_feature (9)..(9): n is a, c, g, or t
  misc_feature (18)..(19): n is a, c, g, or t
  misc_feature (26)..(26): n is a, c, g, or t
  misc_feature (36)..(36): n is a, c, g, or t
  misc_feature (41)..(41): n is a, c, g, or t
  misc_feature (48)..(49): n is a, c, g, or t
  misc_feature (60)..(61): n is a, c, g, or t
  misc_feature (85)..(85): n is a, c, g, or t
  misc_feature (96)..(96): n is a, c, g, or t

SEQ ID NO: 214263 - DNA, 422 bp, Canis familiaris; identical to SEQ ID NO: 4156

SEQ ID NO: 214264 - DNA, 420 bp, Canis familiaris; identical to SEQ ID NO: 4157

SEQ ID NO: 214265 - DNA, 171 bp, Canis familiaris; identical to SEQ ID NO: 4158

SEQ ID NO: 214266 - DNA, 422 bp, Canis familiaris; identical to SEQ ID NO: 4159

SEQ ID NO: 214267 - DNA, 417 bp, Canis familiaris; identical to SEQ ID NO: 4160
  misc_feature (371)..(371): n is a, c, g, or t

SEQ ID NO: 214268 - DNA, 417 bp, Canis familiaris; identical to SEQ ID NO: 4161

SEQ ID NO: 214269 - DNA, 192 bp, Canis familiaris; identical to SEQ ID NO: 4162

SEQ ID NO: 214270 - DNA, 415 bp, Canis familiaris; identical to SEQ ID NO: 4163

SEQ ID NO: 214271 - DNA, 420 bp, Canis familiaris; identical to SEQ ID NO: 4164

SEQ ID NO: 214272 - DNA, 421 bp, Canis familiaris; identical to SEQ ID NO: 4165

SEQ ID NO: 214273 - DNA, 402 bp, Canis familiaris; identical to SEQ ID NO: 4166

SEQ ID NO: 214274 - DNA, 233 bp, Canis familiaris; identical to SEQ ID NO: 4167
  misc_feature (105)..(105): n is a, c, g, or t

SEQ ID NO: 214275 - DNA, 416 bp, Canis familiaris; identical to SEQ ID NO: 4168

SEQ ID NO: 214276 - DNA, 419 bp, Canis familiaris; identical to SEQ ID NO: 4169

SEQ ID NO: 214277 - DNA, 417 bp, Canis familiaris; identical to SEQ ID NO: 4170

SEQ ID NO: 214278 - DNA, 240 bp, Canis familiaris; identical to SEQ ID NO: 4171
  misc_feature (222)..(222): n is a, c, g, or t
  misc_feature (224)..(225): n is a, c, g, or t
  misc_feature (229)..(230): n is a, c, g, or t
  misc_feature (235)..(235): n is a, c, g, or t

SEQ ID NO: 214279 - DNA, 388 bp, Canis familiaris; identical to SEQ ID NO: 4172

SEQ ID NO: 214280 - DNA, 222 bp, Canis familiaris; identical to SEQ ID NO: 4173
  misc_feature (203)..(203): n is a, c, g, or t
  misc_feature (205)..(205): n is a, c, g, or t
  misc_feature (208)..(208): n is a, c, g, or t

SEQ ID NO: 214281 - DNA, 236 bp, Canis familiaris; identical to SEQ ID NO: 4174
  misc_feature (215)..(216): n is a, c, g, or t

SEQ ID NO: 214282 - DNA, 418 bp, Canis familiaris; identical to SEQ ID NO: 4175

SEQ ID NO: 214283 - DNA, 416 bp, Canis familiaris; identical to SEQ ID NO: 4176

SEQ ID NO: 214284 - DNA, 290 bp, Canis familiaris; identical to SEQ ID NO: 4177

SEQ ID NO: 214285 - DNA, 420 bp, Canis familiaris; identical to SEQ ID NO: 4178

SEQ ID NO: 214286 - DNA, 357 bp, Canis familiaris; identical to SEQ ID NO: 4179

SEQ ID NO: 214287 - DNA, 251 bp, Canis familiaris; identical to SEQ ID NO: 4180
  misc_feature (221)..(223): n is a, c, g, or t
  misc_feature (229)..(231): n is a, c, g, or t

SEQ ID NO: 214288 - DNA, 204 bp, Canis familiaris; identical to SEQ ID NO: 4181

SEQ ID NO: 214289 - DNA, 425 bp, Canis familiaris; identical to SEQ ID NO: 4182

SEQ ID NO: 214290 - DNA, 212 bp, Canis familiaris; identical to SEQ ID NO: 4183

SEQ ID NO: 214291 - DNA, 419 bp, Canis familiaris; identical to SEQ ID NO: 4184

SEQ ID NO: 214292 - DNA, 395 bp, Canis familiaris; identical to SEQ ID NO: 4185

SEQ ID NO: 214293 - DNA, 265 bp, Canis familiaris; identical to SEQ ID NO: 4186
  misc_feature (177)..(178): n is a, c, g, or t
  misc_feature (199)..(199): n is a, c, g, or t
  misc_feature (203)..(204): n is a, c, g, or t

SEQ ID NO: 214294 - DNA, 421 bp, Canis familiaris; identical to SEQ ID NO: 4187

SEQ ID NO: 214295 - DNA, 181 bp, Canis familiaris; identical to SEQ ID NO: 4188

SEQ ID NO: 214296 - DNA, 420 bp, Canis familiaris; identical to SEQ ID NO: 4189
  misc_feature (393)..(393): n is a, c, g, or t

SEQ ID NO: 214297 - DNA, 417 bp, Canis familiaris; identical to SEQ ID NO: 4190

SEQ ID NO: 214298 - DNA, 209 bp, Canis familiaris; identical to SEQ ID NO: 4191
  misc_feature (71)..(71): n is a, c, g, or t
  misc_feature (75)..(75): n is a, c, g, or t
  misc_feature (134)..(139): n is a, c, g, or t
  misc_feature (154)..(154): n is a, c, g, or t

SEQ ID NO: 214299 - DNA, 294 bp, Canis familiaris; identical to SEQ ID NO: 4192

SEQ ID NO: 214300 - DNA, 390 bp, Canis familiaris; identical to SEQ ID NO: 4193

SEQ ID NO: 214301 - DNA, 421 bp, Canis familiaris; identical to SEQ ID NO: 4194

SEQ ID NO: 214302 - DNA, 319 bp, Canis familiaris; identical to SEQ ID NO: 4195

SEQ ID NO: 214303 - DNA, 417 bp, Canis familiaris; identical to SEQ ID NO: 4196
  misc_feature (405)..(405): n is a, c, g, or t

SEQ ID NO: 214304 - DNA, 420 bp, Canis familiaris; identical to SEQ ID NO: 4197

SEQ ID NO: 214305 - DNA, 419 bp, Canis familiaris; identical to SEQ ID NO: 4198
  misc_feature (375)..(375): n is a, c, g, or t

SEQ ID NO: 214306 - DNA, 420 bp, Canis familiaris; identical to SEQ ID NO: 4199

SEQ ID NO: 214307 - DNA, 418 bp, Canis familiaris; identical to SEQ ID NO: 4200

SEQ ID NO: 214308 - DNA, 417 bp, Canis familiaris; identical to SEQ ID NO: 4201

SEQ ID NO: 214309 - DNA, 311 bp, Canis familiaris; identical to SEQ ID NO: 4202

SEQ ID NO: 214310 - DNA, 424 bp, Canis familiaris; identical to SEQ ID NO: 4203

SEQ ID NO: 214311 - DNA, 383 bp, Canis familiaris; identical to SEQ ID NO: 4204

SEQ ID NO: 214312 - DNA, 419 bp, Canis familiaris; identical to SEQ ID NO: 4205

SEQ ID NO: 214313 - DNA, 175 bp, Canis familiaris; identical to SEQ ID NO: 4206

SEQ ID NO: 214314 - DNA, 421 bp, Canis familiaris; identical to SEQ ID NO: 4207

SEQ ID NO: 214315 - DNA, 422 bp, Canis familiaris; identical to SEQ ID NO: 4208

SEQ ID NO: 214316 - DNA, 420 bp, Canis familiaris; identical to SEQ ID NO: 4209

SEQ ID NO: 214317 - DNA, 183 bp, Canis familiaris; identical to SEQ ID NO: 4210

SEQ ID NO: 214318 - DNA, 415 bp, Canis familiaris; identical to SEQ ID NO: 4211

SEQ ID NO: 214319 - DNA, 417 bp, Canis familiaris; identical to SEQ ID NO: 4212

SEQ ID NO: 214320 - DNA, 417 bp, Canis familiaris; identical to SEQ ID NO: 4213

SEQ ID NO: 214321 - DNA, 334 bp, Canis familiaris; identical to SEQ ID NO: 4214

SEQ ID NO: 214322 - DNA, 246 bp, Canis familiaris; identical to SEQ ID NO: 4215

SEQ ID NO: 214323 - DNA, 418 bp, Canis familiaris; identical to SEQ ID NO: 4216

SEQ ID NO: 214324 - DNA, 216 bp, Canis familiaris; identical to SEQ ID NO: 4217

SEQ ID NO: 214325 - DNA, 422 bp, Canis familiaris; identical to SEQ ID NO: 4218

SEQ ID NO: 214326 - DNA, 413 bp, Canis familiaris; identical to SEQ ID NO: 4219

SEQ ID NO: 214327 - DNA, 412 bp, Canis familiaris; identical to SEQ ID NO: 4220

SEQ ID NO: 214328 - DNA, 195 bp, Canis familiaris; identical to SEQ ID NO: 4221

SEQ ID NO: 214329 - DNA, 421 bp, Canis familiaris; identical to SEQ ID NO: 4222

SEQ ID NO: 214330 - DNA, 228 bp, Canis familiaris; identical to SEQ ID NO: 4223

SEQ ID NO: 214331 - DNA, 317 bp, Canis familiaris; identical to SEQ ID NO: 4224
  misc_feature (216)..(216): n is a, c, g, or t
  misc_feature (221)..(222): n is a, c, g, or t

SEQ ID NO: 214332 - DNA, 416 bp, Canis familiaris; identical to SEQ ID NO: 4225

SEQ ID NO: 214333 - DNA, 271 bp, Canis familiaris; identical to SEQ ID NO: 4226
  misc_feature (217)..(218): n is a, c, g, or t
  misc_feature (223)..(224): n is a, c, g, or t
  misc_feature (229)..(229): n is a, c, g, or t
  misc_feature (235)..(235): n is a, c, g, or t
  misc_feature (241)..(241): n is a, c, g, or t

SEQ ID NO: 214334 - DNA, 268 bp, Canis familiaris; identical to SEQ ID NO: 4227

SEQ ID NO: 214335 - DNA, 157 bp, Canis familiaris; identical to SEQ ID NO: 4228

SEQ ID NO: 214336 - DNA, 342 bp, Canis familiaris; identical to SEQ ID NO: 4229

SEQ ID NO: 214337 - DNA, 388 bp, Canis familiaris; identical to SEQ ID NO: 4230

SEQ ID NO: 214338 - DNA, 211 bp, Canis familiaris; identical to SEQ ID NO: 4231

SEQ ID NO: 214339 - DNA, 415 bp, Canis familiaris; identical to SEQ ID NO: 4232

SEQ ID NO: 214340 - DNA, 340 bp, Canis familiaris; identical to SEQ ID NO: 4233

SEQ ID NO: 214341 - DNA, 425 bp, Canis familiaris; identical to SEQ ID NO: 4234

SEQ ID NO: 214342 - DNA, 418 bp, Canis familiaris; identical to SEQ ID NO: 4235

SEQ ID NO: 214343 - DNA, 400 bp, Canis familiaris; identical to SEQ ID NO: 4236

SEQ ID NO: 214344 - DNA, 420 bp, Canis familiaris; identical to SEQ ID NO: 4237

SEQ ID NO: 214345 - DNA, 413 bp, Canis familiaris; identical to SEQ ID NO: 4238

SEQ ID NO: 214346 - DNA, 419 bp, Canis familiaris; identical to SEQ ID NO: 4239

SEQ ID NO: 214347 - DNA, 414 bp, Canis familiaris; identical to SEQ ID NO: 4240

SEQ ID NO: 214348 - DNA, 418 bp, Canis familiaris; identical to SEQ ID NO: 4241

SEQ ID NO: 214349 - DNA, 422 bp, Canis familiaris; identical to SEQ ID NO: 4242

SEQ ID NO: 214350 - DNA, 417 bp, Canis familiaris; identical to SEQ ID NO: 4243

SEQ ID NO: 214351 - DNA, 424 bp, Canis familiaris; identical to SEQ ID NO: 4244

SEQ ID NO: 214352 - DNA, 422 bp, Canis familiaris; identical to SEQ ID NO: 4245

SEQ ID NO: 214353 - DNA, 404 bp, Canis familiaris; identical to SEQ ID NO: 4246

SEQ ID NO: 214354 - DNA, 414 bp, Canis familiaris; identical to SEQ ID NO: 4247

SEQ ID NO: 214355 - DNA, 410 bp, Canis familiaris; identical to SEQ ID NO: 4248

SEQ ID NO: 214356 - DNA, 142 bp, Canis familiaris; identical to SEQ ID NO: 4249
  misc_feature (47)..(47): n is a, c, g, or t
  misc_feature (56)..(56): n is a, c, g, or t
  misc_feature (62)..(62): n is a, c, g, or t
  misc_feature (69)..(69): n is a, c, g, or t

SEQ ID NO: 214357 - DNA, 404 bp, Canis familiaris; identical to SEQ ID NO: 4250

SEQ ID NO: 214358 - DNA, 406 bp, Canis familiaris; identical to SEQ ID NO: 4251

SEQ ID NO: 214359 - DNA, 358 bp, Canis familiaris; identical to SEQ ID NO: 4252

SEQ ID NO: 214360 - DNA, 411 bp, Canis familiaris; identical to SEQ ID NO: 4253

SEQ ID NO: 214361 - DNA, 284 bp, Canis familiaris; identical to SEQ ID NO: 4254

SEQ ID NO: 214362 - DNA, 110 bp, Canis familiaris; identical to SEQ ID NO: 4255
  misc_feature (90)..(90): n is a, c, g, or t

SEQ ID NO: 214363 - DNA, 396 bp, Canis familiaris; identical to SEQ ID NO: 4256

SEQ ID NO: 214364 - DNA, 408 bp, Canis familiaris; identical to SEQ ID NO: 4257
  misc_feature (408)..(408): n is a, c, g, or t

SEQ ID NO: 214365 - DNA, 390 bp, Canis familiaris; identical to SEQ ID NO: 4258

SEQ ID NO: 214366 - DNA, 409 bp, Canis familiaris; identical to SEQ ID NO: 4259

SEQ ID NO: 214367 - DNA, 311 bp, Canis familiaris; identical to SEQ ID NO: 4260

SEQ ID NO: 214368 - DNA, 409 bp, Canis familiaris; identical to SEQ ID NO: 4261

SEQ ID NO: 214369 - DNA, 414 bp, Canis familiaris; identical to SEQ ID NO: 4262
  misc_feature (298)..(298): n is a, c, g, or t
  misc_feature (380)..(380): n is a, c, g, or t

SEQ ID NO: 214370 - DNA, 407 bp, Canis familiaris; identical to SEQ ID NO: 4263

SEQ ID NO: 214371 - DNA, 228 bp, Canis familiaris; identical to SEQ ID NO: 4264

SEQ ID NO: 214372 - DNA, 405 bp, Canis familiaris; identical to SEQ ID NO: 4265

SEQ ID NO: 214373 - DNA, 279 bp, Canis familiaris; identical to SEQ ID NO: 4266

SEQ ID NO: 214374 - DNA, 413 bp, Canis familiaris; identical to SEQ ID NO: 4267
  misc_feature (337)..(337): n is a, c, g, or t
  misc_feature (351)..(351): n is a, c, g, or t

SEQ ID NO: 214375 - DNA, 406 bp, Canis familiaris; identical to SEQ ID NO: 4268

SEQ ID NO: 214376 - DNA, 183 bp, Canis familiaris; identical to SEQ ID NO: 4269

SEQ ID NO: 214377 - DNA, 423 bp, Canis familiaris; identical to SEQ ID NO: 4270

SEQ ID NO: 214378 - DNA, 419 bp, Canis familiaris; identical to SEQ ID NO: 4271

SEQ ID NO: 214379 - DNA, 410 bp, Canis familiaris; identical to SEQ ID NO: 4272

SEQ ID NO: 214380 - DNA, 403 bp, Canis familiaris; identical to SEQ ID NO: 4273

SEQ ID NO: 214381 - DNA, 412 bp, Canis familiaris; identical to SEQ ID NO: 4274

SEQ ID NO: 214382 - DNA, 405 bp, Canis familiaris; identical to SEQ ID NO: 4275
  misc_feature (181)..(182): n is a, c, g, or t

SEQ ID NO: 214383 - DNA, 377 bp, Canis familiaris; identical to SEQ ID NO: 4276

SEQ ID NO: 214384 - DNA, 417 bp, Canis familiaris; identical to SEQ ID NO: 4277

SEQ ID NO: 214385 - DNA, 400 bp, Canis familiaris; identical to SEQ ID NO: 4278

SEQ ID NO: 214386 - DNA, 402 bp, Canis familiaris; identical to SEQ ID NO: 4279

SEQ ID NO: 214387 - DNA, 336 bp, Canis familiaris; identical to SEQ ID NO: 4280
  misc_feature (8)..(8): n is a, c, g, or t

SEQ ID NO: 214388 - DNA, 383 bp, Canis familiaris; identical to SEQ ID NO: 4281
  misc_feature (361)..(361): n is a, c, g, or t

SEQ ID NO: 214389 - DNA, 385 bp, Canis familiaris; identical to SEQ ID NO: 4282

SEQ ID NO: 214390 - DNA, 403 bp, Canis familiaris; identical to SEQ ID NO: 4283
  misc_feature (297)..(297): n is a, c, g, or t

SEQ ID NO: 214391 - DNA, 354 bp, Canis familiaris; identical to SEQ ID NO: 4284

SEQ ID NO: 214392 - DNA, 199 bp, Canis familiaris; identical to SEQ ID NO: 4285

SEQ ID NO: 214393 - DNA, 403 bp, Canis familiaris; identical to SEQ ID NO: 4286

SEQ ID NO: 214394 - DNA, 271 bp, Canis familiaris; identical to SEQ ID NO: 4287

SEQ ID NO: 214395 - DNA, 375 bp, Canis familiaris; identical to SEQ ID NO: 4288

SEQ ID NO: 214396 - DNA, 253 bp, Canis familiaris; identical to SEQ ID NO: 4289
  misc_feature (196)..(196): n is a, c, g, or t

SEQ ID NO: 214397 - DNA, 396 bp, Canis familiaris; identical to SEQ ID NO: 4290

SEQ ID NO: 214398 - DNA, 428 bp, Canis familiaris; identical to SEQ ID NO: 4291
  misc_feature (393)..(393): n is a, c, g, or t

SEQ ID NO: 214399 - DNA, 385 bp, Canis familiaris; identical to SEQ ID NO: 4292
  misc_feature (64)..(64): n is a, c, g, or t
  misc_feature (278)..(278): n is a, c, g, or t

SEQ ID NO: 214400 - DNA, 340 bp, Canis familiaris; identical to SEQ ID NO: 4293

SEQ ID NO: 214401 - DNA, 427 bp, Canis familiaris; identical to SEQ ID NO: 4294

SEQ ID NO: 214402 - DNA, 319 bp, Canis familiaris; identical to SEQ ID NO: 4295

SEQ ID NO: 214403 - DNA, 393 bp, Canis familiaris; identical to SEQ ID NO: 4296

SEQ ID NO: 214404 - DNA, 415 bp, Canis familiaris; identical to SEQ ID NO: 4297
  misc_feature (382)..(382): n is a, c, g, or t

SEQ ID NO: 214405 - DNA, 150 bp, Canis familiaris; identical to SEQ ID NO: 4298

SEQ ID NO: 214406 - DNA, 239 bp, Canis familiaris; identical to SEQ ID NO: 4299

SEQ ID NO: 214407 - DNA, 419 bp, Canis familiaris; identical to SEQ ID NO: 4300

SEQ ID NO: 214408 - DNA, 413 bp, Canis familiaris; identical to SEQ ID NO: 4301

SEQ ID NO: 214409 - DNA, 415 bp, Canis familiaris; identical to SEQ ID NO: 4302

SEQ ID NO: 214410 - DNA, 417 bp, Canis familiaris; identical to SEQ ID NO: 4303

SEQ ID NO: 214411 - DNA, 390 bp, Canis familiaris; identical to SEQ ID NO: 4304

SEQ ID NO: 214412 - DNA, 409 bp, Canis familiaris; identical to SEQ ID NO: 4305

SEQ ID NO: 214413 - DNA, 323 bp, Canis familiaris; identical to SEQ ID NO: 4306

SEQ ID NO: 214414 - DNA, 396 bp, Canis familiaris; identical to SEQ ID NO: 4307

SEQ ID NO: 214415 - DNA, 419 bp, Canis familiaris; identical to SEQ ID NO: 4308

SEQ ID NO: 214416 - DNA, 139 bp, Canis familiaris; identical to SEQ ID NO: 4309

SEQ ID NO: 214417 - DNA, 408 bp, Canis familiaris; identical to SEQ ID NO: 4310
  misc_feature (269)..(272): n is a, c, g, or t
  misc_feature (275)..(275): n is a, c, g, or t

SEQ ID NO: 214418 - DNA, 407 bp, Canis familiaris; identical to SEQ ID NO: 4311

SEQ ID NO: 214419 - DNA, 299 bp, Canis familiaris; identical to SEQ ID NO: 4312

SEQ ID NO: 214420 - DNA, 418 bp, Canis familiaris; identical to SEQ ID NO: 4313

SEQ ID NO: 214421 - DNA, 212 bp, Canis familiaris; identical to SEQ ID NO: 4314

SEQ ID NO: 214422 - DNA, 385 bp, Canis familiaris; identical to SEQ ID NO: 4315

SEQ ID NO: 214423 - DNA, 158 bp, Canis familiaris; identical to SEQ ID NO: 4316

SEQ ID NO: 214424 - DNA, 420 bp, Canis familiaris; identical to SEQ ID NO: 4317

SEQ ID NO: 214425 - DNA, 299 bp, Canis familiaris; identical to SEQ ID NO: 4318
  misc_feature (268)..(268): n is a, c, g, or t

SEQ ID NO: 214426 - DNA, 396 bp, Canis familiaris; identical to SEQ ID NO: 4319

SEQ ID NO: 214427 - DNA, 396 bp, Canis familiaris; identical to SEQ ID NO: 4320

SEQ ID NO: 214428 - DNA, 149 bp, Canis familiaris; identical to SEQ ID NO: 4321

SEQ ID NO: 214429 - DNA, 392 bp, Canis familiaris; identical to SEQ ID NO: 4322

SEQ ID NO: 214430 - DNA, 434 bp, Canis familiaris; identical to SEQ ID NO: 4323

SEQ ID NO: 214431 - DNA, 422 bp, Canis familiaris; identical to SEQ ID NO: 4324

SEQ ID NO: 214432 - DNA, 194 bp, Canis familiaris; identical to SEQ ID NO: 4325

SEQ ID NO: 214433 - DNA, 428 bp, Canis familiaris; identical to SEQ ID NO: 4326

SEQ ID NO: 214434 - DNA, 392 bp, Canis familiaris; identical to SEQ ID NO: 4327

SEQ ID NO: 214435 - DNA, 108 bp, Canis familiaris; identical to SEQ ID NO: 4328

SEQ ID NO: 214436 - DNA, 419 bp, Canis familiaris; identical to SEQ ID NO: 4329

SEQ ID NO: 214437 - DNA, 252 bp, Canis familiaris; identical to SEQ ID NO: 4330

SEQ ID NO: 214438 - DNA, 336 bp, Canis familiaris; identical to SEQ ID NO: 4331

SEQ ID NO: 214439 - DNA, 412 bp, Canis familiaris; identical to SEQ ID NO: 4332

SEQ ID NO: 214440 - DNA, 235 bp, Canis familiaris; identical to SEQ ID NO: 4333

SEQ ID NO: 214441 - DNA, 425 bp, Canis familiaris; identical to SEQ ID NO: 4334

SEQ ID NO: 214442 - DNA, 420 bp, Canis familiaris; identical to SEQ ID NO: 4335

SEQ ID NO: 214443 - DNA, 371 bp, Canis familiaris; identical to SEQ ID NO: 4336
  misc_feature (312)..(312): n is a, c, g, or t

SEQ ID NO: 214444 - DNA, 298 bp, Canis familiaris; identical to SEQ ID NO: 4337
  misc_feature (116)..(116): n is a, c, g, or t
  misc_feature (119)..(119): n is a, c, g, or t
  misc_feature (122)..(122): n is a, c, g, or t
  misc_feature (126)..(126): n is a, c, g, or t
  misc_feature (136)..(136): n is a, c, g, or t

SEQ ID NO: 214445 - DNA, 205 bp, Canis familiaris; identical to SEQ ID NO: 4338
  misc_feature (21)..(21): n is a, c, g, or t
  misc_feature (24)..(24): n is a, c, g, or t
  misc_feature (28)..(28): n is a, c, g, or t
  misc_feature (41)..(41): n is a, c, g, or t
  misc_feature (53)..(53): n is a, c, g, or t
  misc_feature (59)..(59): n is a, c, g, or t
  misc_feature (72)..(72): n is a, c, g, or t
  misc_feature (78)..(78): n is a, c, g, or t
  misc_feature (80)..(80): n is a, c, g, or t
  misc_feature (94)..(94): n is a, c, g, or t
  misc_feature (96)..(96): n is a, c, g, or t
  misc_feature (98)..(99): n is a, c, g, or t
  misc_feature (107)..(107): n is a, c, g, or t
  misc_feature (128)..(128): n is a, c, g, or t
  misc_feature (132)..(132): n is a, c, g, or t

SEQ ID NO: 214446 - DNA, 343 bp, Canis familiaris; identical to SEQ ID NO: 4339
  misc_feature (1)..(1): n is a, c, g, or t
  misc_feature (37)..(39): n is a, c, g, or t
  misc_feature (42)..(42): n is a, c, g, or t

SEQ ID NO: 214447 - DNA, 230 bp, Canis familiaris; identical to SEQ ID NO: 4340
  misc_feature (90)..(90): n is a, c, g, or t
  misc_feature (181)..(181): n is a, c, g, or t
  misc_feature (189)..(189): n is a, c, g, or t

SEQ ID NO: 214448 - DNA, 384 bp, Canis familiaris; identical to SEQ ID NO: 4341
  misc_feature (42)..(42): n is a, c, g, or t
  misc_feature (60)..(60): n is a, c, g, or t
  misc_feature (76)..(76): n is a, c, g, or t
  misc_feature (90)..(90): n is a, c, g, or t
  misc_feature (104)..(104): n is a, c, g, or t
  misc_feature (120)..(120): n is a, c, g, or t
  misc_feature (123)..(123): n is a, c, g, or t
  misc_feature (147)..(147): n is a, c, g, or t
  misc_feature (217)..(217): n is a, c, g, or t
  misc_feature (227)..(227): n is a, c, g, or t
  misc_feature (330)..(330): n is a, c, g, or t

SEQ ID NO: 214449 - DNA, 390 bp, Canis familiaris; identical to SEQ ID NO: 4342
  misc_feature (28)..(28): n is a, c, g, or t
  misc_feature (47)..(47): n is a, c, g, or t
  misc_feature (62)..(62): n is a, c, g, or t
  misc_feature (65)..(65): n is a, c, g, or t
  misc_feature (75)..(75): n is a, c, g, or t
  misc_feature (89)..(89): n is a, c, g, or t
  misc_feature (100)..(100): n is a, c, g, or t
  misc_feature (121)..(121): n is a, c, g, or t
  misc_feature (124)..(124): n is a, c, g, or t
  misc_feature (127)..(127): n is a, c, g, or t
  misc_feature (148)..(148): n is a, c, g, or t
  misc_feature (154)..(154): n is a, c, g, or t
  misc_feature (166)..(166): n is a, c, g, or t
  misc_feature (228)..(228): n is a, c, g, or t
  misc_feature (332)..(332): n is a, c, g, or t

SEQ ID NO: 214450 - DNA, 389 bp, Canis familiaris; identical to SEQ ID NO: 4343
  misc_feature (82)..(82): n is a, c, g, or t
  misc_feature (116)..(116): n is a, c, g, or t
  misc_feature (242)..(242): n is a, c, g, or t
  misc_feature (378)..(378): n is a, c, g, or t
  misc_feature (386)..(386): n is a, c, g, or t

SEQ ID NO: 214451 - DNA, 293 bp, Canis familiaris; identical to SEQ ID NO: 4344
  misc_feature (15)..(15): n is a, c, g, or t
  misc_feature (20)..(20): n is a, c, g, or t
  misc_feature (24)..(24): n is a, c, g, or t
  misc_feature (44)..(44): n is a, c, g, or t
  misc_feature (52)..(52): n is a, c, g, or t
  misc_feature (57)..(57): n is a, c, g, or t
  misc_feature (61)..(61): n is a, c, g, or t
  misc_feature (63)..(63): n is a, c, g, or t
  misc_feature (66)..(66): n is a, c, g, or t
  misc_feature (68)..(69): n is a, c, g, or t
  misc_feature (79)..(80): n is a, c, g, or t
  misc_feature (97)..(97): n is a, c, g, or t
  misc_feature (99)..(99): n is a, c, g, or t
  misc_feature (114)..(114): n is a, c, g, or t
  misc_feature (171)..(171): n is a, c, g, or t

SEQ ID NO: 214452 - DNA, 187 bp, Canis familiaris; identical to SEQ ID NO: 4345
  misc_feature (55)..(55): n is a, c, g, or t
  misc_feature (64)..(64): n is a, c, g, or t
  misc_feature (66)..(66): n is a, c, g, or t
  misc_feature (97)..(97): n is a, c, g, or t
  misc_feature (99)..(99): n is a, c, g, or t

SEQ ID NO: 214453 - DNA, 383 bp, Canis familiaris; identical to SEQ ID NO: 4346
  misc_feature (3)..(4): n is a, c, g, or t
  misc_feature (13)..(13): n is a, c, g, or t
  misc_feature (20)..(21): n is a, c, g, or t
  misc_feature (28)..(28): n is a, c, g, or t
  misc_feature (37)..(37): n is a, c, g, or t
  misc_feature (43)..(43): n is a, c, g, or t
  misc_feature (62)..(62): n is a, c, g, or t
  misc_feature (133)..(134): n is a, c, g, or t
  misc_feature (155)..(155): n is a, c, g, or t
  misc_feature (160)..(160): n is a, c, g, or t
  misc_feature (202)..(202): n is a, c, g, or t
  misc_feature (296)..(296): n is a, c, g, or t
  misc_feature (317)..(317): n is a, c, g, or t
  misc_feature (319)..(319): n is a, c, g, or t
  misc_feature (327)..(327): n is a, c, g, or t
  misc_feature (332)..(332): n is a, c, g, or t
  misc_feature (341)..(341): n is a, c, g, or t
  misc_feature (354)..(354): n is a, c, g, or t

SEQ ID NO: 214454 - DNA, 392 bp, Canis familiaris; identical to SEQ ID NO: 4347
  misc_feature (25)..(25): n is a, c, g, or t
  misc_feature (71)..(71): n is a, c, g, or t
  misc_feature (129)..(129): n is a, c, g, or t
  misc_feature (132)..(132): n is a, c, g, or t

SEQ ID NO: 214455 - DNA, 505 bp, Canis familiaris; identical to SEQ ID NO: 4348
  misc_feature (36)..(36): n is a, c, g, or t
  misc_feature (38)..(39): n is a, c, g, or t
  misc_feature (68)..(69): n is a, c, g, or t
  misc_feature (72)..(72): n is a, c, g, or t
  misc_feature (75)..(76): n is a, c, g, or t
  misc_feature (82)..(83): n is a, c, g, or t
  misc_feature (100)..(100): n is a, c, g, or t
  misc_feature (223)..(223): n is a, c, g, or t
  misc_feature (427)..(427): n is a, c, g, or t

SEQ ID NO: 214456 - DNA, 381 bp, Canis familiaris; identical to SEQ ID NO: 4349
  misc_feature (6)..(6): n is a, c, g, or t
  misc_feature (16)..(16): n is a, c, g, or t
  misc_feature (28)..(28): n is a, c, g, or t
  misc_feature (42)..(42): n is a, c, g, or t
  misc_feature (63)..(63): n is a, c, g, or t
  misc_feature (295)..(295): n is a, c, g, or t

SEQ ID NO: 214457 - DNA, 403 bp, Canis familiaris; identical to SEQ ID NO: 4350
  misc_feature (72)..(72): n is a, c, g, or t
  misc_feature (107)..(107): n is a, c, g, or t
  misc_feature (226)..(226): n is a, c, g, or t
  misc_feature (326)..(326): n is a, c, g, or t
  misc_feature (342)..(342): n is a, c, g, or t

SEQ ID NO: 214458 - DNA, 341 bp, Canis familiaris; identical to SEQ ID NO: 4351
  misc_feature (7)..(7): n is a, c, g, or t
  misc_feature (15)..(15): n is a, c, g, or t
  misc_feature (18)..(18): n is a, c, g, or t
  misc_feature (22)..(22): n is a, c, g, or t
  misc_feature (29)..(30): n is a, c, g, or t
  misc_feature (37)..(37): n is a, c, g, or t
  misc_feature (39)..(41): n is a, c, g, or t
  misc_feature (74)..(75): n is a, c, g, or t
  misc_feature (77)..(77): n is a, c, g, or t
  misc_feature (79)..(79): n is a, c, g, or t
  misc_feature (85)..(85): n is a, c, g, or t
  misc_feature (88)..(88): n is a, c, g, or t
  misc_feature (114)..(114): n is a, c, g, or t
  misc_feature (139)..(139): n is a, c, g, or t

SEQ ID NO: 214459 - DNA, 252 bp, Canis familiaris; identical to SEQ ID NO: 4352
  misc_feature (1)..(2): n is a, c, g, or t
  misc_feature (20)..(20): n is a, c, g, or t
  misc_feature (29)..(29): n is a, c, g, or t
  misc_feature (38)..(38): n is a, c, g, or t
  misc_feature (45)..(45): n is a, c, g, or t
  misc_feature (47)..(47): n is a, c, g, or t
  misc_feature (56)..(56): n is a, c, g, or t
  misc_feature (71)..(71): n is a, c, g, or t
  misc_feature (73)..(73): n is a, c, g, or t
  misc_feature (89)..(89): n is a, c, g, or t
  misc_feature (91)..(91): n is a, c, g, or t
  misc_feature (93)..(93): n is a, c, g, or t
  misc_feature (95)..(95): n is a, c, g, or t
  misc_feature (99)..(99): n is a, c, g, or t
  misc_feature (101)..(101): n is a, c, g, or t
  misc_feature (104)..(105): n is a, c, g, or t

SEQ ID NO: 214460 - DNA, 392 bp, Canis familiaris; identical to SEQ ID NO: 4353
  misc_feature (18)..(18): n is a, c, g, or t
  misc_feature (37)..(37): n is a, c, g, or t
  misc_feature (55)..(55): n is a, c, g, or t
  misc_feature (68)..(68): n is a, c, g, or t
  misc_feature (102)..(102): n is a, c, g, or t
  misc_feature (133)..(133): n is a, c, g, or t
  misc_feature (147)..(147): n is a, c, g, or t
  misc_feature (172)..(172): n is a, c, g, or t
  misc_feature (193)..(193): n is a, c, g, or t
  misc_feature (209)..(209): n is a, c, g, or t
  misc_feature (266)..(266): n is a, c, g, or t
  misc_feature (299)..(299): n is a, c, g, or t
  misc_feature (374)..(374): n is a, c, g, or t
  misc_feature (380)..(380): n is a, c, g, or t

SEQ ID NO: 214461 - DNA, 388 bp, Canis familiaris; identical to SEQ ID NO: 4354
  misc_feature (4)..(4): n is a, c, g, or t
  misc_feature (13)..(14): n is a, c, g, or t
  misc_feature (24)..(24): n is a, c, g, or t
  misc_feature (302)..(302): n is a, c, g, or t
  misc_feature (371)..(371): n is a, c, g, or t

SEQ ID NO: 214462 - DNA, 333 bp, Canis familiaris; identical to SEQ ID NO: 4355
  misc_feature (19)..(19): n is a, c, g, or t
  misc_feature (42)..(42): n is a, c, g, or t
  misc_feature (62)..(62): n is a, c, g, or t
  misc_feature (136)..(136): n is a, c, g, or t
  misc_feature (147)..(147): n is a, c, g, or t
  misc_feature (184)..(184): n is a, c, g, or t
  misc_feature (207)..(207): n is a, c, g, or t
  misc_feature (227)..(227): n is a, c, g, or t
  misc_feature (283)..(283): n is a, c, g, or t
  misc_feature (285)..(285): n is a, c, g, or t

SEQ ID NO: 214463 - DNA, 406 bp, Canis familiaris; identical to SEQ ID NO: 4356
  misc_feature (30)..(30): n is a, c, g, or t
  misc_feature (48)..(49): n is a, c, g, or t
  misc_feature (69)..(69): n is a, c, g, or t
  misc_feature (82)..(83): n is a, c, g, or t
  misc_feature (91)..(91): n is a, c, g, or t
  misc_feature (112)..(112): n is a, c, g, or t
  misc_feature (119)..(119): n is a, c, g, or t
  misc_feature (162)..(162): n is a, c, g, or t
  misc_feature (176)..(176): n is a, c, g, or t
  misc_feature (212)..(212): n is a, c, g, or t
  misc_feature (299)..(299): n is a, c, g, or t
  misc_feature (394)..(394): n is a, c, g, or t

SEQ ID NO: 214464 - DNA, 214 bp, Canis familiaris; identical to SEQ ID NO: 4357
  misc_feature (7)..(7): n is a, c, g, or t
  misc_feature (17)..(17): n is a, c, g, or t
  misc_feature (89)..(89): n is a, c, g, or t
  misc_feature (141)..(141): n is a, c, g, or t
  misc_feature (143)..(143): n is a, c, g, or t
  misc_feature (154)..(154): n is a, c, g, or t
  misc_feature (191)..(191): n is a, c, g, or t

SEQ ID NO: 214465 - DNA, 211 bp, Canis familiaris; identical to SEQ ID NO: 4358
  misc_feature (74)..(74): n is a, c, g, or t
  misc_feature (110)..(110): n is a, c, g, or t
  misc_feature (131)..(131): n is a, c, g, or t

SEQ ID NO: 214466 - DNA, 290 bp, Canis familiaris; identical to SEQ ID NO: 4359
  misc_feature (19)..(19): n is a, c, g, or t
  misc_feature (43)..(43): n is a, c, g, or t
  misc_feature (58)..(58): n is a, c, g, or t
  misc_feature (100)..(100): n is a, c, g, or t
  misc_feature (110)..(110): n is a, c, g, or t
  misc_feature (181)..(181): n is a, c, g, or t
  misc_feature (185)..(185): n is a, c, g, or t
  misc_feature (223)..(223): n is a, c, g, or t
  misc_feature (238)..(238): n is a, c, g, or t
  misc_feature (270)..(270): n is a, c, g, or t

SEQ ID NO: 214467 - DNA, 309 bp, Canis familiaris; identical to SEQ ID NO: 4360

SEQ ID NO: 214468 - DNA, 421 bp, Canis familiaris; identical to SEQ ID NO: 4361
  misc_feature (401)..(401): n is a, c, g, or t

SEQ ID NO: 214469 - DNA, 422 bp, Canis familiaris; identical to SEQ ID NO: 4362

SEQ ID NO: 214470 - DNA, 411 bp, Canis familiaris; identical to SEQ ID NO: 4363
  misc_feature (363)..(363): n is a, c, g, or t
  misc_feature (399)..(399): n is a, c, g, or t

SEQ ID NO: 214471 - DNA, 363 bp, Canis familiaris; identical to SEQ ID NO: 4364

SEQ ID NO: 214472 - DNA, 344 bp, Canis familiaris; identical to SEQ ID NO: 4365

SEQ ID NO: 214473 - DNA, 413 bp, Canis familiaris; identical to SEQ ID NO: 4366

SEQ ID NO: 214474 - DNA, 407 bp, Canis familiaris; identical to SEQ ID NO: 4367
  misc_feature (191)..(191): n is a, c, g, or t
  misc_feature (273)..(273): n is a, c, g, or t
  misc_feature (275)..(275): n is a, c, g, or t
  misc_feature (277)..(278): n is a, c, g, or t
  misc_feature (280)..(281): n is a, c, g, or t
  misc_feature (370)..(370): n is a, c, g, or t

SEQ ID NO: 214475 - DNA, 417 bp, Canis familiaris; identical to SEQ ID NO: 4368

SEQ ID NO: 214476 - DNA, 409 bp, Canis familiaris; identical to SEQ ID NO: 4369

SEQ ID NO: 214477 - DNA, 317 bp, Canis familiaris; identical to SEQ ID NO: 4370
  misc_feature (214)..(215): n is a, c, g, or t

SEQ ID NO: 214478 - DNA, 405 bp, Canis familiaris; identical to SEQ ID NO: 4371
  misc_feature (388)..(389): n is a, c, g, or t

SEQ ID NO: 214479 - DNA, 423 bp, Canis familiaris; identical to SEQ ID NO: 4372
  misc_feature (277)..(277): n is a, c, g, or t

SEQ ID NO: 214480 - DNA, 399 bp, Canis familiaris; identical to SEQ ID NO: 4373

SEQ ID NO: 214481 - DNA, 195 bp, Canis familiaris; identical to SEQ ID NO: 4374

SEQ ID NO: 214482 - DNA, 357 bp, Canis familiaris; identical to SEQ ID NO: 4375

SEQ ID NO: 214483 - DNA, 412 bp, Canis familiaris; identical to SEQ ID NO: 4376

SEQ ID NO: 214484 - DNA, 408 bp, Canis familiaris; identical to SEQ ID NO: 4377

SEQ ID NO: 214485 - DNA, 410 bp, Canis familiaris; identical to SEQ ID NO: 4378

SEQ ID NO: 214486 - DNA, 415 bp, Canis familiaris; identical to SEQ ID NO: 4379
  misc_feature (413)..(413): n is a, c, g, or t

SEQ ID NO: 214487 - DNA, 427 bp, Canis familiaris; identical to SEQ ID NO: 4380

SEQ ID NO: 214488 - DNA, 379 bp, Canis familiaris; identical to SEQ ID NO: 4381

SEQ ID NO: 214489 - DNA, 368 bp, Canis familiaris; identical to SEQ ID NO: 4382

SEQ ID NO: 214490 - DNA, 176 bp, Canis familiaris; identical to SEQ ID NO: 4383

SEQ ID NO: 214491 - DNA, 386 bp, Canis familiaris; identical to SEQ ID NO: 4384

SEQ ID NO: 214492 - DNA, 466 bp, Canis familiaris; identical to SEQ ID NO: 4385
  misc_feature (11)..(12): n is a, c, g, or t
  misc_feature (14)..(14): n is a, c, g, or t
  misc_feature (17)..(17): n is a, c, g, or t
  misc_feature (38)..(38): n is a, c, g, or t
  misc_feature (47)..(48): n is a, c, g, or t
  misc_feature (53)..(53): n is a, c, g, or t
  misc_feature (61)..(61): n is a, c, g, or t
  misc_feature (72)..(72): n is a, c, g, or t
  misc_feature (78)..(78): n is a, c, g, or t
  misc_feature (80)..(80): n is a, c, g, or t
  misc_feature (88)..(88): n is a, c, g, or t
  misc_feature (91)..(91): n is a, c, g, or t
  misc_feature (104)..(104): n is a, c, g, or t
  misc_feature (116)..(117): n is a, c, g, or t
  misc_feature (120)..(121): n is a, c, g, or t
  misc_feature (124)..(124): n is a, c, g, or t
  misc_feature (132)..(132): n is a, c, g, or t
  misc_feature (135)..(135): n is a, c, g, or t
  misc_feature (146)..(146): n is a, c, g, or t
  misc_feature (149)..(149): n is a, c, g, or t
  misc_feature (152)..(152): n is a, c, g, or t

SEQ ID NO: 214493 - DNA, 382 bp, Canis familiaris; identical to SEQ ID NO: 4386

SEQ ID NO: 214494 - DNA, 409 bp, Canis familiaris; identical to SEQ ID NO: 4387

SEQ ID NO: 214495 - DNA, 227 bp, Canis familiaris; identical to SEQ ID NO: 4388

SEQ ID NO: 214496 - DNA, 420 bp, Canis familiaris; identical to SEQ ID NO: 4389

SEQ ID NO: 214497 - DNA, 399 bp, Canis familiaris; identical to SEQ ID NO: 4390

SEQ ID NO: 214498 - DNA, 431 bp, Canis familiaris; identical to SEQ ID NO: 4391

SEQ ID NO: 214499 - DNA, 428 bp, Canis familiaris; identical to SEQ ID NO: 4392

SEQ ID NO: 214500 - DNA, 371 bp, Canis familiaris; identical to SEQ ID NO: 4393

SEQ ID NO: 214501 - DNA, 350 bp, Canis familiaris; identical to SEQ ID NO: 4394

SEQ ID NO: 214502 - DNA, 399 bp, Canis familiaris; identical to SEQ ID NO: 4395

SEQ ID NO: 214503 - DNA, 425 bp, Canis familiaris; identical to SEQ ID NO: 4396

SEQ ID NO: 214504 - DNA, 398 bp, Canis familiaris; identical to SEQ ID NO: 4397

SEQ ID NO: 214505 - DNA, 427 bp, Canis familiaris; identical to SEQ ID NO: 4398

SEQ ID NO: 214506 - DNA, 415 bp, Canis familiaris; identical to SEQ ID NO: 4399

SEQ ID NO: 214507 - DNA, 429 bp, Canis familiaris; identical to SEQ ID NO: 4400

SEQ ID NO: 214508 - DNA, 409 bp, Canis familiaris; identical to SEQ ID NO: 4401

SEQ ID NO: 214509 - DNA, 421 bp, Canis familiaris; identical to SEQ ID NO: 4402

SEQ ID NO: 214510 - DNA, 425 bp, Canis familiaris; identical to SEQ ID NO: 4403

SEQ ID NO: 214511 - DNA, 421 bp, Canis familiaris; identical to SEQ ID NO: 4404

SEQ ID NO: 214512 - DNA, 335 bp, Canis familiaris; identical to SEQ ID NO: 4405

SEQ ID NO: 214513 - DNA, 319 bp, Canis familiaris; identical to SEQ ID NO: 4406
  misc_feature (4)..(4): n is a, c, g, or t
  misc_feature (10)..(10): n is a, c, g, or t
  misc_feature (19)..(19): n is a, c, g, or t
  misc_feature (21)..(22): n is a, c, g, or t
  misc_feature (24)..(24): n is a, c, g, or t
  misc_feature (27)..(27): n is a, c, g, or t
  misc_feature (30)..(30): n is a, c, g, or t
  misc_feature (33)..(34): n is a, c, g, or t
  misc_feature (44)..(44): n is a, c, g, or t
  misc_feature (53)..(57): n is a, c, g, or t
  misc_feature (61)..(61): n is a, c, g, or t
  misc_feature (64)..(64): n is a, c, g, or t
  misc_feature (72)..(72): n is a, c, g, or t
  misc_feature (75)..(75): n is a, c, g, or t
  misc_feature (77)..(77): n is a, c, g, or t
  misc_feature (84)..(84): n is a, c, g, or t
  misc_feature (112)..(112): n is a, c, g, or t
  misc_feature (125)..(125): n is a, c, g, or t
  misc_feature (135)..(135): n is a, c, g, or t
  misc_feature (139)..(140): n is a, c, g, or t
  misc_feature (144)..(144): n is a, c, g, or t
  misc_feature (146)..(146): n is a, c, g, or t
  misc_feature (182)..(182): n is a, c, g, or t
  misc_feature (222)..(222): n is a, c, g, or t
  misc_feature (231)..(231): n is a, c, g, or t
  misc_feature (236)..(237): n is a, c, g, or t
  misc_feature (260)..(260): n is a, c, g, or t
  misc_feature (262)..(262): n is a, c, g, or t
  misc_feature (276)..(277): n is a, c, g, or t
  misc_feature (287)..(287): n is a, c, g, or t

SEQ ID NO: 214514 - DNA, 450 bp, Canis familiaris; identical to SEQ ID NO: 4407
  misc_feature (3)..(3): n is a, c, g, or t
  misc_feature (9)..(9): n is a, c, g, or t
  misc_feature (49)..(49): n is a, c, g, or t
  misc_feature (51)..(51): n is a, c, g, or t
  misc_feature (54)..(54): n is a, c, g, or t
  misc_feature (82)..(82): n is a, c, g, or t
  misc_feature (98)..(99): n is a, c, g, or t
  misc_feature (132)..(132): n is a, c, g, or t
  misc_feature (134)..(134): n is a, c, g, or t
  misc_feature (141)..(141): n is a, c, g, or t
  misc_feature (152)..(153): n is a, c, g, or t
  misc_feature (156)..(156): n is a, c, g, or t
  misc_feature (159)..(159): n is a, c, g, or t
  misc_feature (161)..(161): n is a, c, g, or t
  misc_feature (164)..(164): n is a, c, g, or t
  misc_feature (171)..(171): n is a, c, g, or t
  misc_feature (173)..(173): n is a, c, g, or t
  misc_feature (198)..(198): n is a, c, g, or t
  misc_feature (203)..(203): n is a, c, g, or t
  misc_feature (209)..(210): n is a, c, g, or t
  misc_feature (231)..(231): n is a, c, g, or t
  misc_feature (246)..(247): n is a, c, g, or t
  misc_feature (261)..(261): n is a, c, g, or t
  misc_feature (302)..(302): n is a, c, g, or t
  misc_feature (306)..(306): n is a, c, g, or t
  misc_feature (316)..(316): n is a, c, g, or t
  misc_feature (327)..(327): n is a, c, g, or t
  misc_feature (361)..(361): n is a, c, g, or t
  misc_feature (370)..(370): n is a, c, g, or t
  misc_feature (431)..(431): n is a, c, g, or t
  misc_feature (445)..(445): n is a, c, g, or t

SEQ ID NO: 214515 - DNA, 389 bp, Canis familiaris; identical to SEQ ID NO: 4408
  misc_feature (1)..(1): n is a, c, g, or t
  misc_feature (5)..(6): n is a, c, g, or t
  misc_feature (10)..(12): n is a, c, g, or t
  misc_feature (14)..(14): n is a, c, g, or t
  misc_feature (17)..(19): n is a, c, g, or t
  misc_feature (37)..(37): n is a, c, g, or t
  misc_feature (45)..(45): n is a, c, g, or t
  misc_feature (49)..(49): n is a, c, g, or t
  misc_feature (57)..(58): n is a, c, g, or t
  misc_feature (60)..(61): n is a, c, g, or t
  misc_feature (63)..(63): n is a, c, g, or t
  misc_feature (67)..(68): n is a, c, g, or t
  misc_feature (71)..(72): n is a, c, g, or t
  misc_feature (91)..(95): n is a, c, g, or t
  misc_feature (99)..(99): n is a, c, g, or t
  misc_feature (102)..(102): n is a, c, g, or t
  misc_feature (110)..(110): n is a, c, g, or t
  misc_feature (113)..(113): n is a, c, g, or t
  misc_feature (115)..(115): n is a, c, g, or t
  misc_feature (122)..(122): n is a, c, g, or t
  misc_feature (125)..(125): n is a, c, g, or t
  misc_feature (129)..(129): n is a, c, g, or t
  misc_feature (136)..(138): n is a, c, g, or t
  misc_feature (142)..(142): n is a, c, g, or t
  misc_feature (145)..(145): n is a, c, g, or t
  misc_feature (148)..(148): n is a, c, g, or t
  misc_feature (150)..(151): n is a, c, g, or t
  misc_feature (159)..(160): n is a, c, g, or t
  misc_feature (163)..(163): n is a, c, g, or t
  misc_feature (169)..(170): n is a, c, g, or t
  misc_feature (172)..(172): n is a, c, g, or t
  misc_feature (178)..(178): n is a, c, g, or t
  misc_feature (180)..(182): n is a, c, g, or t
  misc_feature (184)..(185): n is a, c, g, or t
  misc_feature (190)..(190): n is a, c, g, or t
  misc_feature (195)..(197): n is a, c, g, or t
  misc_feature (211)..(211): n is a, c, g, or t
  misc_feature (213)..(215): n is a, c, g, or t
  misc_feature (217)..(218): n is a, c, g, or t
  misc_feature (241)..(241): n is a, c, g, or t
  misc_feature (246)..(246): n is a, c, g, or t
  misc_feature (250)..(251): n is a, c, g, or t
  misc_feature (264)..(264): n is a, c, g, or t
  misc_feature (284)..(284): n is a, c, g, or t
  misc_feature (286)..(287): n is a, c, g, or t
  misc_feature (292)..(292): n is a, c, g, or t
  misc_feature (294)..(294): n is a, c, g, or t
  misc_feature (303)..(303): n is a, c, g, or t
  misc_feature (320)..(320): n is a, c, g, or t
  misc_feature (332)..(332): n is a, c, g, or t

SEQ ID NO: 214516 - DNA, 511 bp, Canis familiaris; identical to SEQ ID NO: 4409
  misc_feature (3)..(5): n is a, c, g, or t
  misc_feature (7)..(10): n is a, c, g, or t
  misc_feature (33)..(34): n is a, c, g, or t
  misc_feature (36)..(36): n is a, c, g, or t
  misc_feature (47)..(47): n is a, c, g, or t
  misc_feature (50)..(50): n is a, c, g, or t
  misc_feature (53)..(53): n is a, c, g, or t
  misc_feature (56)..(56): n is a, c, g, or t
  misc_feature (76)..(76): n is a, c, g, or t
  misc_feature (92)..(92): n is a, c, g, or t
  misc_feature (100)..(100): n is a, c, g, or t
  misc_feature (103)..(103): n is a, c, g, or t
  misc_feature (105)..(105): n is a, c, g, or t
  misc_feature (109)..(110): n is a, c, g, or t
  misc_feature (117)..(117): n is a, c, g, or t
  misc_feature (121)..(121): n is a, c, g, or t
  misc_feature (125)..(125): n is a, c, g, or t
  misc_feature (128)..(128): n is a, c, g, or t
  misc_feature (131)..(131): n is a, c, g, or t
  misc_feature (136)..(136): n is a, c, g, or t
  misc_feature (140)..(140): n is a, c, g, or t
  misc_feature (142)..(142): n is a, c, g, or t
  misc_feature (144)..(144): n is a, c, g, or t
  misc_feature (147)..(147): n is a, c, g, or t
  misc_feature (155)..(155): n is a, c, g, or t
  misc_feature (199)..(199): n is a, c, g, or t
  misc_feature (201)..(201): n is a, c, g, or t
  misc_feature (207)..(207): n is a, c, g, or t
  misc_feature (209)..(209): n is a, c, g, or t
  misc_feature (211)..(211): n is a, c, g, or t
  misc_feature (213)..(213): n is a, c, g, or t
  misc_feature (266)..(266): n is a, c, g, or t
  misc_feature (279)..(279): n is a, c, g, or t
  misc_feature (287)..(287): n is a, c, g, or t
  misc_feature (295)..(297): n is a, c, g, or t
  misc_feature (311)..(311): n is a, c, g, or t
  misc_feature (313)..(313): n is a, c, g, or t
  misc_feature (319)..(320): n is a, c, g, or t
  misc_feature (323)..(323): n is a, c, g, or t
  misc_feature (355)..(355): n is a, c, g, or t
  misc_feature (360)..(360): n is a, c, g, or t
  misc_feature (378)..(379): n is a, c, g, or t
  misc_feature (409)..(409): n is a, c, g, or t
  misc_feature (412)..(412): n is a, c, g, or t
  misc_feature (418)..(418): n is a, c, g, or t
  misc_feature (460)..(460): n is a, c, g, or t
  misc_feature (495)..(496): n is a, c, g, or t
  misc_feature (507)..(507): n is a, c, g, or t

SEQ ID NO: 214517 - DNA, 390 bp, Canis familiaris; identical to SEQ ID NO: 4410

SEQ ID NO: 214518 - DNA, 443 bp, Canis familiaris; identical to SEQ ID NO: 4411
  misc_feature (8)..(8): n is a, c, g, or t
  misc_feature (40)..(41): n is a, c, g, or t
  misc_feature (43)..(43): n is a, c, g, or t
  misc_feature (50)..(50): n is a, c, g, or t
  misc_feature (70)..(70): n is a, c, g, or t
  misc_feature (76)..(76): n is a, c, g, or t
  misc_feature (85)..(85): n is a, c, g, or t
  misc_feature (88)..(88): n is a, c, g, or t
  misc_feature (102)..(106): n is a, c, g, or t
  misc_feature (117)..(118): n is a, c, g, or t
  misc_feature (124)..(125): n is a, c, g, or t
  misc_feature (132)..(135): n is a, c, g, or t
  misc_feature (153)..(154): n is a, c, g, or t
  misc_feature (160)..(160): n is a, c, g, or t
  misc_feature (162)..(162): n is a, c, g, or t
  misc_feature (177)..(177): n is a, c, g, or t
  misc_feature (180)..(180): n is a, c, g, or t
  misc_feature (183)..(185): n is a, c, g, or t
  misc_feature (212)..(212): n is a, c, g, or t
  misc_feature (219)..(222): n is a, c, g, or t
  misc_feature (237)..(237): n is a, c, g, or t
  misc_feature (242)..(243): n is a, c, g, or t
  misc_feature (248)..(248): n is a, c, g, or t
  misc_feature (265)..(265): n is a, c, g, or t
  misc_feature (270)..(270): n is a, c, g, or t
  misc_feature (273)..(273): n is a, c, g, or t
  misc_feature (276)..(277): n is a, c, g, or t
  misc_feature (281)..(281): n is a, c, g, or t
  misc_feature (298)..(300): n is a, c, g, or t
  misc_feature (312)..(314): n is a, c, g, or t

SEQ ID NO: 214519 - DNA, 423 bp, Canis familiaris; identical to SEQ ID NO: 4412

SEQ ID NO: 214520 - DNA, 303 bp, Canis familiaris; identical to SEQ ID NO: 4413

SEQ ID NO: 214521 - DNA, 380 bp, Canis familiaris; identical to SEQ ID NO: 4414

SEQ ID NO: 214522 - DNA, 343 bp, Canis familiaris; identical to SEQ ID NO: 4415
  misc_feature (3)..(3): n is a, c, g, or t
  misc_feature (20)..(20): n is a, c, g, or t
  misc_feature (24)..(24): n is a, c, g, or t
  misc_feature (34)..(34): n is a, c, g, or t
  misc_feature (50)..(52): n is a, c, g, or t
  misc_feature (54)..(54): n is a, c, g, or t
  misc_feature (76)..(76): n is a, c, g, or t
  misc_feature (84)..(84): n is a, c, g, or t
  misc_feature (91)..(93): n is a, c, g, or t
  misc_feature (111)..(111): n is a, c, g, or t
  misc_feature (140)..(140): n is a, c, g, or t
  misc_feature (144)..(144): n is a, c, g, or t
  misc_feature (152)..(153): n is a, c, g, or t
  misc_feature (157)..(157): n is a, c, g, or t
  misc_feature (163)..(163): n is a, c, g, or t
  misc_feature (173)..(173): n is a, c, g, or t
  misc_feature (186)..(186): n is a, c, g, or t
  misc_feature (199)..(199): n is a, c, g, or t
  misc_feature (213)..(213): n is a, c, g, or t
  misc_feature (216)..(217): n is a, c, g, or t
  misc_feature (219)..(220): n is a, c, g, or t
  misc_feature (228)..(228): n is a, c, g, or t
  misc_feature (231)..(232): n is a, c, g, or t
  misc_feature (237)..(237): n is a, c, g, or t
  misc_feature (240)..(241): n is a, c, g, or t
  misc_feature (252)..(252): n is a, c, g, or t
  misc_feature (295)..(295): n is a, c, g, or t

SEQ ID NO: 214523 - DNA, 263 bp, Canis familiaris; identical to SEQ ID NO: 4416

SEQ ID NO: 214524 - DNA, 345 bp, Canis familiaris; identical to SEQ ID NO: 4417

SEQ ID NO: 214525 - DNA, 368 bp, Canis familiaris; identical to SEQ ID NO: 4418
  misc_feature (4)..(4): n is a, c, g, or t
  misc_feature (7)..(7): n is a, c, g, or t
  misc_feature (9)..(9): n is a, c, g, or t
  misc_feature (18)..(18): n is a, c, g, or t
  misc_feature (34)..(34): n is a, c, g, or t
  misc_feature (36)..(37): n is a, c, g, or t
  misc_feature (51)..(51): n is a, c, g, or t
  misc_feature (73)..(73): n is a, c, g, or t
  misc_feature (75)..(75): n is a, c, g, or t
  misc_feature (78)..(78): n is a, c, g, or t
  misc_feature (81)..(81): n is a, c, g, or t
  misc_feature (84)..(84): n is a, c, g, or t
  misc_feature (87)..(87): n is a, c, g, or t
  misc_feature (90)..(90): n is a, c, g, or t
  misc_feature (107)..(107): n is a, c, g, or t
  misc_feature (111)..(111): n is a, c, g, or t
  misc_feature (133)..(133): n is a, c, g, or t
  misc_feature (138)..(138): n is a, c, g, or t
  misc_feature (156)..(156): n is a, c, g, or t

SEQ ID NO: 214526 - DNA, 200 bp, Canis familiaris; identical to SEQ ID NO: 4419
  misc_feature (4)..(4): n is a, c, g, or t
  misc_feature (17)..(17): n is a, c, g, or t
  misc_feature (26)..(26): n is a, c, g, or t
  misc_feature (31)..(31): n is a, c, g, or t
  misc_feature (40)..(40): n is a, c, g, or t
  misc_feature (42)..(43): n is a, c, g, or t
  misc_feature (45)..(45): n is a, c, g, or t
  misc_feature (51)..(52): n is a, c, g, or t
  misc_feature (74)..(75): n is a, c, g, or t
  misc_feature (93)..(93): n is a, c, g, or t
  misc_feature (96)..(96): n is a, c, g, or t
  misc_feature (98)..(98): n is a, c, g, or t
  misc_feature (138)..(138): n is a, c, g, or t
  misc_feature (143)..(143): n is a, c, g, or t
  misc_feature (184)..(184): n is a, c, g, or t

SEQ ID NO: 214527 - DNA, 404 bp, Canis familiaris; identical to SEQ ID NO: 4420
  misc_feature (15)..(15): n is a, c, g, or t
  misc_feature (18)..(18): n is a, c, g, or t
  misc_feature (20)..(20): n is a, c, g, or t
  misc_feature (24)..(24): n is a, c, g, or t
  misc_feature (34)..(34): n is a, c, g, or t
  misc_feature (38)..(38): n is a, c, g, or t
  misc_feature (41)..(41): n is a, c, g, or t
  misc_feature (57)..(57): n is a, c, g, or t
  misc_feature (66)..(66): n is a, c, g, or t
  misc_feature (71)..(71): n is a, c, g, or t
  misc_feature (75)..(75): n is a, c, g, or t
  misc_feature (79)..(79): n is a, c, g, or t
  misc_feature (114)..(114): n is a, c, g, or t
  misc_feature (122)..(122): n is a, c, g, or t
  misc_feature (141)..(141): n is a, c, g, or t
  misc_feature (144)..(146): n is a, c, g, or t
  misc_feature (159)..(159): n is a, c, g, or t
  misc_feature (170)..(170): n is a, c, g, or t
  misc_feature (173)..(174): n is a, c, g, or t
  misc_feature (182)..(182): n is a, c, g, or t
  misc_feature (186)..(187): n is a, c, g, or t
  misc_feature (191)..(191): n is a, c, g, or t
  misc_feature (195)..(197): n is a, c, g, or t
  misc_feature (228)..(228): n is a, c, g, or t
  misc_feature (283)..(283): n is a, c, g, or t
  misc_feature (299)..(300): n is a, c, g, or t
  misc_feature (351)..(351): n is a, c, g, or t
  misc_feature (361)..(361): n is a, c, g, or t

SEQ ID NO: 214528 - DNA, 375 bp, Canis familiaris; identical to SEQ ID NO: 4421

SEQ ID NO: 214529 - DNA, 301 bp, Canis familiaris; identical to SEQ ID NO: 4422

SEQ ID NO: 214530 - DNA, 395 bp, Canis familiaris; identical to SEQ ID NO: 4423

SEQ ID NO: 214531 - DNA, 264 bp, Canis familiaris; identical to SEQ ID NO: 4424

SEQ ID NO: 214532 - DNA, 395 bp, Canis familiaris; identical to SEQ ID NO: 4425
  misc_feature (15)..(15): n is a, c, g, or t
  misc_feature (17)..(17): n is a, c, g, or t
  misc_feature (23)..(23): n is a, c, g, or t
  misc_feature (27)..(27): n is a, c, g, or t
  misc_feature (37)..(37): n is a, c, g, or t
  misc_feature (42)..(42): n is a, c, g, or t
  misc_feature (53)..(54): n is a, c, g, or t
  misc_feature (56)..(56): n is a, c, g, or t
  misc_feature (62)..(62): n is a, c, g, or t
  misc_feature (85)..(86): n is a, c, g, or t
  misc_feature (104)..(104): n is a, c, g, or t
  misc_feature (107)..(107): n is a, c, g, or t
  misc_feature (135)..(136): n is a, c, g, or t
  misc_feature (169)..(169): n is a, c, g, or t
  misc_feature (172)..(173): n is a, c, g, or t
  misc_feature (187)..(187): n is a, c, g, or t
  misc_feature (194)..(194): n is a, c, g, or t
  misc_feature (213)..(213): n is a, c, g, or t
  misc_feature (242)..(242): n is a, c, g, or t
  misc_feature (244)..(244): n is a, c, g, or t
  misc_feature (262)..(263): n is a, c, g, or t
  misc_feature (267)..(267): n is a, c, g, or t
  misc_feature (273)..(273): n is a, c, g, or t
  misc_feature (339)..(339): n is a, c, g, or t
  misc_feature (367)..(367): n is a, c, g, or t
  misc_feature (370)..(370): n is a, c, g, or t

SEQ ID NO: 214533 - DNA, 397 bp, Canis familiaris; identical to SEQ ID NO: 4426

SEQ ID NO: 214534 - DNA, 366 bp, Canis familiaris; identical to SEQ ID NO: 4427
  misc_feature (3)..(4): n is a, c, g, or t
  misc_feature (10)..(10): n is a, c, g, or t
  misc_feature (24)..(24): n is a, c, g, or t
  misc_feature (27)..(27): n is a, c, g, or t
  misc_feature (49)..(49): n is a, c, g, or t
  misc_feature (58)..(58): n is a, c, g, or t
  misc_feature (76)..(76): n is a, c, g, or t
  misc_feature (108)..(108): n is a, c, g, or t
  misc_feature (113)..(113): n is a, c, g, or t
  misc_feature (124)..(126): n is a, c, g, or t
  misc_feature (136)..(136): n is a, c, g, or t
  misc_feature (145)..(145): n is a, c, g, or t
  misc_feature (149)..(149): n is a, c, g, or t
  misc_feature (157)..(157): n is a, c, g, or t
  misc_feature (160)..(160): n is a, c, g, or t
  misc_feature (163)..(164): n is a, c, g, or t
  misc_feature (172)..(172): n is a, c, g, or t
  misc_feature (175)..(175): n is a, c, g, or t
  misc_feature (187)..(187): n is a, c, g, or t
  misc_feature (196)..(197): n is a, c, g, or t
  misc_feature (202)..(203): n is a, c, g, or t
  misc_feature (207)..(208): n is a, c, g, or t
  misc_feature (217)..(217): n is a, c, g, or t
  misc_feature (221)..(221): n is a, c, g, or t
  misc_feature (228)..(229): n is a, c, g, or t
  misc_feature (244)..(244): n is a, c, g, or t
  misc_feature (258)..(258): n is a, c, g, or t
  misc_feature (270)..(270): n is a, c, g, or t
  misc_feature (284)..(284): n is a, c, g, or t
  misc_feature (292)..(292): n is a, c, g, or t
  misc_feature (294)..(294): n is a, c, g, or t

SEQ ID NO: 214535 - DNA, 356 bp, Canis familiaris; identical to SEQ ID NO: 4428
  misc_feature (4)..(4): n is a, c, g, or t
  misc_feature (9)..(11): n is a, c, g, or t
  misc_feature (13)..(13): n is a, c, g, or t
  misc_feature (34)..(34): n is a, c, g, or t
  misc_feature (37)..(37): n is a, c, g, or t
  misc_feature (43)..(43): n is a, c, g, or t
  misc_feature (50)..(50): n is a, c, g, or t
  misc_feature (52)..(53): n is a, c, g, or t
  misc_feature (58)..(58): n is a, c, g, or t
  misc_feature (64)..(64): n is a, c, g, or t
  misc_feature (87)..(88): n is a, c, g, or t
  misc_feature (106)..(106): n is a, c, g, or t
  misc_feature (109)..(109): n is a, c, g, or t

SEQ ID NO: 214536 - DNA, 104 bp, Canis familiaris; identical to SEQ ID NO: 4429

SEQ ID NO: 214537 - DNA, 341 bp, Canis familiaris; identical to SEQ ID NO: 4430

SEQ ID NO: 214538 - DNA, 424 bp, Canis familiaris; identical to SEQ ID NO: 4431

SEQ ID NO: 214539 - DNA, 246 bp, Canis familiaris; identical to SEQ ID NO: 4432

SEQ ID NO: 214540 - DNA, 303 bp, Canis familiaris; identical to SEQ ID NO: 4433
  misc_feature (35)..(35): n is a, c, g, or t

SEQ ID NO: 214541 - DNA, 414 bp, Canis familiaris; identical to SEQ ID NO: 4434

SEQ ID NO: 214542 - DNA, 372 bp, Canis familiaris; identical to SEQ ID NO: 4435

SEQ ID NO: 214543 - DNA, 262 bp, Canis familiaris; identical to SEQ ID NO: 4436

SEQ ID NO: 214544 - DNA, 415 bp, Canis familiaris; identical to SEQ ID NO: 4437

SEQ ID NO: 214545 - DNA, 367 bp, Canis familiaris; identical to SEQ ID NO: 4438

SEQ ID NO: 214546 - DNA, 419 bp, Canis familiaris; identical to SEQ ID NO: 4439
  misc_feature (334)..(334): n is a, c, g, or t

SEQ ID NO: 214547 - DNA, 245 bp, Canis familiaris; identical to SEQ ID NO: 4440

SEQ ID NO: 214548 - DNA, 391 bp, Canis familiaris; identical to SEQ ID NO: 4441

SEQ ID NO: 214549 - DNA, 176 bp, Canis familiaris; identical to SEQ ID NO: 4442

SEQ ID NO: 214550 - DNA, 373 bp, Canis familiaris; identical to SEQ ID NO: 4443

SEQ ID NO: 214551 - DNA, 299 bp, Canis familiaris; identical to SEQ ID NO: 4444

SEQ ID NO: 214552 - DNA, 245 bp, Canis familiaris; identical to SEQ ID NO: 4445

SEQ ID NO: 214553 - DNA, 428 bp, Canis familiaris; identical to SEQ ID NO: 4446

SEQ ID NO: 214554 - DNA, 236 bp, Canis familiaris; identical to SEQ ID NO: 4447

SEQ ID NO: 214555 - DNA, 368 bp, Canis familiaris; identical to SEQ ID NO: 4448

SEQ ID NO: 214556 - DNA, 420 bp, Canis familiaris; identical to SEQ ID NO: 4449

SEQ ID NO: 214557 - DNA, 420 bp, Canis familiaris; identical to SEQ ID NO: 4450

SEQ ID NO: 214558 - DNA, 416 bp, Canis familiaris; identical to SEQ ID NO: 4451

SEQ ID NO: 214559 - DNA, 180 bp, Canis familiaris; identical to SEQ ID NO: 4452

SEQ ID NO: 214560 - DNA, 400 bp, Canis familiaris; identical to SEQ ID NO: 4453

SEQ ID NO: 214561 - DNA, 385 bp, Canis familiaris; identical to SEQ ID NO: 4454

SEQ ID NO: 214562 - DNA, 421 bp, Canis familiaris; identical to SEQ ID NO: 4455

SEQ ID NO: 214563 - DNA, 235 bp, Canis familiaris; identical to SEQ ID NO: 4456

SEQ ID NO: 214564 - DNA, 413 bp, Canis familiaris; identical to SEQ ID NO: 4457

SEQ ID NO: 214565 - DNA, 305 bp, Canis familiaris; identical to SEQ ID NO: 4458
  misc_feature (14)..(14): n is a, c, g, or t
  misc_feature (18)..(18): n is a, c, g, or t
  misc_feature (32)..(32): n is a, c, g, or t
  misc_feature (44)..(44): n is a, c, g, or t
  misc_feature (58)..(58): n is a, c, g, or t
  misc_feature (95)..(96): n is a, c, g, or t
  misc_feature (119)..(119): n is a, c, g, or t
  misc_feature (124)..(124): n is a, c, g, or t
  misc_feature (155)..(155): n is a, c, g, or t
  misc_feature (162)..(162): n is a, c, g, or t

SEQ ID NO: 214566 - DNA, 153 bp, Canis familiaris; identical to SEQ ID NO: 4459

SEQ ID NO: 214567 - DNA, 335 bp, Canis familiaris; identical to SEQ ID NO: 4460

SEQ ID NO: 214568 - DNA, 382 bp, Canis familiaris; identical to SEQ ID NO: 4461

SEQ ID NO: 214569 - DNA, 375 bp, Canis familiaris; identical to SEQ ID NO: 4462
  misc_feature (2)..(2): n is a, c, g, or t

SEQ ID NO: 214570 - DNA, 202 bp, Canis familiaris; identical to SEQ ID NO: 4463
  misc_feature (168)..(168): n is a, c, g, or t
  misc_feature (172)..(172): n is a, c, g, or t
  misc_feature (174)..(174): n is a, c, g, or t
  misc_feature (177)..(177): n is a, c, g, or t

SEQ ID NO: 214571 - DNA, 239 bp, Canis familiaris; identical to SEQ ID NO: 4464
  misc_feature (2)..(3): n is a, c, g, or t
  misc_feature (5)..(5): n is a, c, g, or t
  misc_feature (8)..(8): n is a, c, g, or t
  misc_feature (11)..(11): n is a, c, g, or t
  misc_feature (29)..(29): n is a, c, g, or t
  misc_feature (31)..(31): n is a, c, g, or t
  misc_feature (42)..(42): n is a, c, g, or t
  misc_feature (45)..(45): n is a, c, g, or t
  misc_feature (49)..(49): n is a, c, g, or t
  misc_feature (53)..(55): n is a, c, g, or t
  misc_feature (81)..(81): n is a, c, g, or t
  misc_feature (92)..(92): n is a, c, g, or t
  misc_feature (102)..(102): n is a, c, g, or t
  misc_feature (113)..(113): n is a, c, g, or t
  misc_feature (162)..(162): n is a, c, g, or t

SEQ ID NO: 214572 - DNA, 347 bp, Canis familiaris; identical to SEQ ID NO: 4465
  misc_feature (4)..(4): n is a, c, g, or t
  misc_feature (10)..(10): n is a, c, g, or t
  misc_feature (41)..(42): n is a, c, g, or t
  misc_feature (44)..(44): n is a, c, g, or t
  misc_feature (59)..(59): n is a, c, g, or t
  misc_feature (62)..(62): n is a, c, g, or t
  misc_feature (64)..(64): n is a, c, g, or t
  misc_feature (72)..(74): n is a, c, g, or t
  misc_feature (77)..(77): n is a, c, g, or t
  misc_feature (85)..(85): n is a, c, g, or t
  misc_feature (87)..(88): n is a, c, g, or t
  misc_feature (95)..(95): n is a, c, g, or t
  misc_feature (101)..(101): n is a, c, g, or t
  misc_feature (104)..(104): n is a, c, g, or t
  misc_feature (106)..(106): n is a, c, g, or t
  misc_feature (109)..(109): n is a, c, g, or t
  misc_feature (115)..(116): n is a, c, g, or t
  misc_feature (118)..(118): n is a, c, g, or t
  misc_feature (123)..(125): n is a, c, g, or t
  misc_feature (128)..(130): n is a, c, g, or t
  misc_feature (132)..(132): n is a, c, g, or t
  misc_feature (142)..(143): n is a, c, g, or t
  misc_feature (147)..(148): n is a, c, g, or t
  misc_feature (165)..(165): n is a, c, g, or t
  misc_feature (207)..(208): n is a, c, g, or t
  misc_feature (236)..(237): n is a, c, g, or t

SEQ ID NO: 214573 - DNA, 421 bp, Canis familiaris; identical to SEQ ID NO: 4466

SEQ ID NO: 214574 - DNA, 418 bp, Canis familiaris; identical to SEQ ID NO: 4467
  misc_feature (414)..(414): n is a, c, g, or t

SEQ ID NO: 214575 - DNA, 204 bp, Canis familiaris; identical to SEQ ID NO: 4468
  misc_feature (111)..(111): n is a, c, g, or t

SEQ ID NO: 214576 - DNA, 262 bp, Canis familiaris; identical to SEQ ID NO: 4469

SEQ ID NO: 214577 - DNA, 407 bp, Canis familiaris; identical to SEQ ID NO: 4470
  misc_feature (154)..(154): n is a, c, g, or t

SEQ ID NO: 214578 - DNA, 250 bp, Canis familiaris; identical to SEQ ID NO: 4471

SEQ ID NO: 214579 - DNA, 175 bp, Canis familiaris; identical to SEQ ID NO: 4472
  misc_feature (2)..(2): n is a, c, g, or t

SEQ ID NO: 214580 - DNA, 249 bp, Canis familiaris; identical to SEQ ID NO: 4473

SEQ ID NO: 214581 - DNA, 441 bp, Canis familiaris; identical to SEQ ID NO: 4474

SEQ ID NO: 214582 - DNA, 423 bp, Canis familiaris; identical to SEQ ID NO: 4475
  misc_feature (15)..(15): n is a, c, g, or t
  misc_feature (18)..(18): n is a, c, g, or t
  misc_feature (20)..(20): n is a, c, g, or t
  misc_feature (26)..(26): n is a, c, g, or t
  misc_feature (31)..(32): n is a, c, g, or t
  misc_feature (39)..(40): n is a, c, g, or t
  misc_feature (60)..(60): n is a, c, g, or t
  misc_feature (65)..(65): n is a, c, g, or t
  misc_feature (68)..(68): n is a, c, g, or t
  misc_feature (72)..(72): n is a, c, g, or t
  misc_feature (76)..(76): n is a, c, g, or t
  misc_feature (79)..(79): n is a, c, g, or t
  misc_feature (81)..(81): n is a, c, g, or t
  misc_feature (98)..(98): n is a, c, g, or t
  misc_feature (116)..(116): n is a, c, g, or t
  misc_feature (125)..(125): n is a, c, g, or t

SEQ ID NO: 214583 - DNA, 360 bp, Canis familiaris; identical to SEQ ID NO: 4476

SEQ ID NO: 214584 - DNA, 600 bp, Canis familiaris
ttagagaagaatccatcaccacggcttgtgaagacacatctaccaattgctcttcttcctaagtctttctgggagaacaactgcaagatgatttatttggctcgaaatgccaaggatgttgcagtctcatattatcattttgacttaatgaataatttggaacctgcccctggtccctgggaggagtatttggagagattcatgactggaaatgtggcctatggttcctggtttaatcatgttaagagctggtggaagaaaaaggaagaacatccaatacttttcttgtactatgaagatatgaaagagaatccaaagcgggaagtccagaagattgctagatttctagagaagaatttgaatgatgaagtcttggataagataattcatcacacctcatttgaaatgatgaaggacaatcctctggtgaattatacacatctaccaagtacagtgatggatcatagcaaatcatcttttatgcgtaaagggattgcaggtgactggaagaattacttcacagtggcccaaaatgagaaatttgatgtcatttacaagaaggaaatgtctggaaccacccttcagtttcgcacagagatt

SEQ ID NO: 214585 - DNA, 600 bp, Canis familiaris
gacatccaccggaagcgcatggagaaggacctgaacgaactgcagacgctgatcgaggctcactttgagaacaggaagaaagaggaggaggagctgatttcactcaaagacaggattgagaagcggcgggccgagcgggccgagcagcagcgcatccggaacgagcgggagaaggagcgtcagactcgcctggctgaggagagagcccgacgagaggaggaggagaacaggaggaaggccgaggacgaggcccggaagaagaaggcgttgtccaacatgatgcactttgggggctacatccagaaggcccagaccgagcggaaaagtgggaagaggcagacggagcgggaaaagaagaagaagattctggctgagaggaggaaggtgctggccatcgaccacctgaacgaggaccagctgagggagaaggccaaggaactgtggcagagcatctacaacctggaggccgagaagttcgacctgcaggagaagttcaagcagcagaaatacgaaatcaatgttctccggaacagaatcaatgataaccagaaagtctccaagacccgcgggaaggccaaggtcaccgggcgctggaaatag

SEQ ID NO: 214586 - DNA, 600 bp, Canis familiaris
gaccaccgccacagcagcctccggagttggacagcaaaaccattgcttcactacccatcggtgttcatttatagaataatgtggaaagaaacaaacccttctgttttattatttactcattatcgcctttcgacagctgtgctgtaacacaagtagatgcctgaacttgaattaatatacaaatcagtaatgtattctctctctttacattttggtctctacattattaatgggttttgtgtactgtaaagaatttagctgtatcaaactagtgcatgaatagattctctcctgattatttatcacgtagcccctagccagttgtatattattcttgtggcttgtgacccaattaaactcctacttgaaatatgctttaagaatcgatgggggatgcttcgtgtgaacatgggagtgtagctgcttctcttgcctaagtattcttttcctgatcactatgcattttaaagttaaagagcatttttaagtattccaaatgatctagagaatttttttccatgattgcattttactgtacagaatgctgcttctgctatatttgtgatagaggaattacaaggatacacatttatttctttg

SEQ ID NO: 214587 - DNA, 600 bp, Canis familiaris
atcaaaaaacagcccaagtacctgaaattgggagctattgatatagaacgcctaaagaatacaccagtcaaatcctcagaaggatctcagcaaaggagtccatcttataccagtgattcaacagtcactttcattatagatggcatgcattgtaaatcatgtgtgttaaatattgaaagtgctttatctacactccaatatgtaagcagcatagtagtttctttagagaatagatctgccatagtaaagtacaatgcaagcttagtcactccagaaaccctgagaaaagcaatagaggccatatcaccaggacaatacagagttagtattgctagtgaagttgagagtacctcaaactctccctccagctcacctcttcaaaagattcctttgaacatagttagccatcctctgactcaagaaactgtaataaacattgatggcatgacttgtaattcttgtgtgcagtctattgagggtgtcatatcaaaaaaggaaggtgtaaaatccatacgagtatctcttgcaaatggcaatgggactgttgagtatgatcctctactaacctctccagaaaccttgagagaagcaatagaagac

SEQ ID NO: 214588 - DNA, 558 bp, Canis familiaris; identical to SEQ ID NO: 4481

SEQ ID NO: 214589 - DNA, 311 bp, Canis familiaris; identical to SEQ ID NO: 4482

SEQ ID NO: 214590 - DNA, 600 bp, Canis familiaris
aaagacagccccaatgtgtttcttttcaaactgggtggggtcaccgcctccttcacggcctctgtaggcagcctgttcctcacggccattgacaggtacatatctattcacaggcccctggcttataagaggattgtcaccaggcccaaggctgtggtggcattttgcctgatgtggaccatagcaattgtgattgctgtgctgcctctcctgggctggaactgcaagaaactgcagtccgtttgctcagacattttcccactcattgatgaaacctacctgatgttctggatcggggtcaccagcgtgctgctgctatttatcgtgtatgcatacatgtatatcctctggaaggctcacagccacgcggtccgcatgattcagcgcggcacccagaaaagtatcatcatccacacatcagaggatggcaaggtgcaggtgacgcggcccgaccaagcccgcatggacattaggctggccaagaccctggttctgatccttgtggttttaatcatctgctggggccctctgcttgcgattatggtgtatgatgtctttgggaagatgaacaagctcattaagacggtatttgcgttctgc

SEQ ID NO: 214591 - DNA, 600 bp, Canis familiaris
cttgtctggcgccaccacctacaagctcacccccgctcagtggttcctgcgggaggggagcatgttcgtggccttgtcggcctccgtgttcagcctcctggccatcgccatcgagcgctacatcacgatgctgaagatgaaactccacaacgggagcaacagcttccgctccttcctgctcatcagcgcctgctgggtcatctccctggtcctgggcggcctgcccatcatgggctggaactgcatcggcgcgctggccagctgctccaccgtgctgccgctctaccacaagcactatatcctcttctgcaccaccgtcttcacgctgctcctgctcgccatcgtcatcctgtactgcaggatctactccctggtcaggacgcggagccgccgcctgaccttccgcaagaacatctccaaggccagccgcagctccgagaagtcgctggccctgctcaagaccgtcattatcgtcctgagcgttttcatcgcctgctgggcgcccctctttatcctgctgctgctggacgtgggctgcaaggtgaagacttgccacatcctcttcagagccgagtacttcctggtgctggccgtgctcaa

SEQ ID NO: 214592 - DNA, 319 bp, Canis familiaris; identical to SEQ ID NO: 4485

SEQ ID NO: 214593 - DNA, 282 bp, Canis familiaris; identical to SEQ ID NO: 4486

SEQ ID NO: 214594 - DNA, 204 bp, Canis familiaris; identical to SEQ ID NO: 4487
  misc_feature (198)..(198): n is a, c, g, or t

SEQ ID NO: 214595 - DNA, 600 bp, Canis familiaris
gagacgcccgtgctccccggcaacggcgacgagcagccgctggctgagaacccccggaagtacgtcatgggccacttccgctgggaccggtttggccgccgcaatggcagcgcgggccagaagcgcgaggaagaagaggtggcggcgggcggaggccgcgccccgctgcccgcgggcggcccggggccccgcggcgacggtggcgagctcggcctgcaagagggcaagcgctcctactccatggagcacttccgctggggcaagccggtgggcaagaagcggcgcccggtgaaggtgtaccccaacggcgctgaggacgagtcggccgaggccttccccgtcgagttcaagagggagctggccgggcagcggctggagccggcgctcggccccgagggcccggccgcgggcgtggcggcgctggccgacctggagtacggcctggtggcggaggccggggcggccgagaagaaggacgacgggccctacaagatggagcacttccgctggggcagcccgcccaaggacaagcgctacgtcggcttcatgagctcggagaggagccagacgcccctggtgacgctgttcaaaaacgccatc

SEQ ID NO: 214596 - DNA, 600 bp, Canis familiaris
gttgggctcctgctgctggctggggtggcgtatgtgcttcctcactggaggtggctgcaggtcactgttactctgcccaacatctgcttcttgctctattactggtgcattcctgagtctccgaggtggctgatctcccagagtaaaaatgctaaagccatgaggatccttaagtacattgcaaagaaaaatggaaaatctctgcctgcctcccttcagagcctcagacctgatgaagaagttgatgagaagttgaatccgtcatttcttgacttgatcagaacccctcaaataagaaaacacactttgatcttgatgtacaactggttcacaagctctgttctctaccaaggcctcatcatgcacatgggccttgcagggagcaatatctacttggatttcttctactctgccctggtggaattcccagctgccatcatcatcatcctcactattgaccgtataggtcgtcggtatccatgggctacatcaaatatagtggcaggagcagcctgccttgcatcagttttcatccctgaagatctacagtggctaagagttacggtctcgtgcttgggtagaatgggcatcaccatggcc

SEQ ID NO: 214597 - DNA, 300 bp, Canis familiaris; identical to SEQ ID NO: 4490

SEQ ID NO: 214598 - DNA, 996 bp, Canis familiaris; identical to SEQ ID NO: 4491

SEQ ID NO: 214599 - DNA, 600 bp, Canis familiaris
cctttgcaatagtactgagggtgggccaattaggagaaatccagctggaaatgtggctagaccaatggtgcaacgtcttcctgaaccacaggatgtcgctcagtgcttggaagttggtttatttgacacacctcctttttactccaattctactaacagtttccgaaacacagtggaaggttacagtgatcccacaggaaagtatgaccctgctattcgaagccttcacaatttggctcatctatttctgaatggaacagggggacaaacccatttatccccaaatgatcctatttttgttctcctacatactttcactgatgcagtttttgatgaatggctgaggagatataaggctgatgtatccacatttccattggaaaatgcccctattgggcataatagacaatacaatatggtaccattctggcctccagttaccaatgtagaaatgtttgttaccgctccagacaatctgggatatacttacgaagttcaatggycaagtcggaatcttagtattcctgagattgttaccatagcggtagttgctgctttagtactggttgcagtcatttttgcgggtgcttcttgcctgat

SEQ ID NO: 214600 - DNA, 287 bp, Canis familiaris; identical to SEQ ID NO: 4493

SEQ ID NO: 214601 - DNA, 450 bp, Canis familiaris; identical to SEQ ID NO: 4494

SEQ ID NO: 214602 - DNA, 503 bp, Canis familiaris; identical to SEQ ID NO: 4495

SEQ ID NO: 214603 - DNA, 183 bp, Canis familiaris; identical to SEQ ID NO: 4496

SEQ ID NO: 214604 - DNA, 448 bp, Canis familiaris; identical to SEQ ID NO: 4497

SEQ ID NO: 214605 - DNA, 103 bp, Canis familiaris; identical to SEQ ID NO: 4498

SEQ ID NO: 214606 - DNA, 503 bp, Canis familiaris; identical to SEQ ID NO: 4499

SEQ ID NO: 214607 - DNA, 504 bp, Canis familiaris; identical to SEQ ID NO: 4500

SEQ ID NO: 214608 - DNA, 499 bp, Canis familiaris; identical to SEQ ID NO: 4501

SEQ ID NO: 214609 - DNA, 503 bp, Canis familiaris; identical to SEQ ID NO: 4502

SEQ ID NO: 214610 - DNA, 504 bp, Canis familiaris; identical to SEQ ID NO: 4503

SEQ ID NO: 214611 - DNA, 121 bp, Canis familiaris; identical to SEQ ID NO: 4504

SEQ ID NO: 214612 - DNA, 517 bp, Canis familiaris; identical to SEQ ID NO: 4505

SEQ ID NO: 214613 - DNA, 492 bp, Canis familiaris; identical to SEQ ID NO: 4506

SEQ ID NO: 214614 - DNA, 152 bp, Canis familiaris; identical to SEQ ID NO: 4507

SEQ ID NO: 214615 - DNA, 517 bp, Canis familiaris; identical to SEQ ID NO: 4508
  misc_feature (7)..(7): n is a, c, g, or t

SEQ ID NO: 214616 - DNA, 510 bp, Canis familiaris; identical to SEQ ID NO: 4509

SEQ ID NO: 214617 - DNA, 508 bp, Canis familiaris; identical to SEQ ID NO: 4510
  misc_feature (7)..(7): n is a, c, g, or t

SEQ ID NO: 214618 - DNA, 519 bp, Canis familiaris; identical to SEQ ID NO: 4511
  misc_feature (12)..(12): n is a, c, g, or t

SEQ ID NO: 214619 - DNA, 521 bp, Canis familiaris; identical to SEQ ID NO: 4512

SEQ ID NO: 214620 - DNA, 229 bp, Canis familiaris; identical to SEQ ID NO: 4513
  misc_feature (98)..(98): n is a, c, g, or t

SEQ ID NO: 214621 - DNA, 414 bp, Canis familiaris; identical to SEQ ID NO: 4514

SEQ ID NO: 214622 - DNA, 508 bp, Canis familiaris; identical to SEQ ID NO: 4515
  misc_feature (11)..(11): n is a, c, g, or t

SEQ ID NO: 214623 - DNA, 491 bp, Canis familiaris; identical to SEQ ID NO: 4516

SEQ ID NO: 214624 - DNA, 501 bp, Canis familiaris; identical to SEQ ID NO: 4517
  misc_feature (8)..(8): n is a, c, g, or t

SEQ ID NO: 214625 - DNA, 104 bp, Canis familiaris; identical to SEQ ID NO: 4518

SEQ ID NO: 214626 - DNA, 449 bp, Canis familiaris; identical to SEQ ID NO: 4519

SEQ ID NO: 214627 - DNA, 231 bp, Canis familiaris; identical to SEQ ID NO: 4520

SEQ ID NO: 214628 - DNA, 359 bp, Canis familiaris; identical to SEQ ID NO: 4521
  misc_feature (10)..(10): n is a, c, g, or t
  misc_feature (36)..(36): n is a, c, g, or t

SEQ ID NO: 214629 - DNA, 500 bp, Canis familiaris; identical to SEQ ID NO: 4522

SEQ ID NO: 214630 - DNA, 312 bp, Canis familiaris; identical to SEQ ID NO: 4523
  misc_feature (5)..(5): n is a, c, g, or t

SEQ ID NO: 214631 - DNA, 502 bp, Canis familiaris; identical to SEQ ID NO: 4524

SEQ ID NO: 214632 - DNA, 334 bp, Canis familiaris; identical to SEQ ID NO: 4525

SEQ ID NO: 214633 - DNA, 238 bp, Canis familiaris; identical to SEQ ID NO: 4526

SEQ ID NO: 214634 - DNA, 504 bp, Canis familiaris; identical to SEQ ID NO: 4527

SEQ ID NO: 214635 - DNA, 438 bp, Canis familiaris; identical to SEQ ID NO: 4528

SEQ ID NO: 214636 - DNA, 504 bp, Canis familiaris; identical to SEQ ID NO: 4529
  misc_feature (11)..(11): n is a, c, g, or t

SEQ ID NO: 214637 - DNA, 406 bp, Canis familiaris; identical to SEQ ID NO: 4530

SEQ ID NO: 214638 - DNA, 510 bp, Canis familiaris; identical to SEQ ID NO: 4531

SEQ ID NO: 214639 - DNA, 400 bp, Canis familiaris; identical to SEQ ID NO: 4532

SEQ ID NO: 214640 - DNA, 270 bp, Canis familiaris; identical to SEQ ID NO: 4533

SEQ ID NO: 214641 - DNA, 319 bp, Canis familiaris; identical to SEQ ID NO: 4534
  misc_feature (15)..(15): n is a, c, g, or t

SEQ ID NO: 214642 - DNA, 502 bp, Canis familiaris; identical to SEQ ID NO: 4535

SEQ ID NO: 214643 - DNA, 438 bp, Canis familiaris; identical to SEQ ID NO: 4536

SEQ ID NO: 214644 - DNA, 506 bp, Canis familiaris; identical to SEQ ID NO: 4537

SEQ ID NO: 214645 - DNA, 137 bp, Canis familiaris; identical to SEQ ID NO: 4538
  misc_feature (10)..(10): n is a, c, g, or t

SEQ ID NO: 214646 - DNA, 301 bp, Canis familiaris; identical to SEQ ID NO: 4539

SEQ ID NO: 214647 - DNA, 491 bp, Canis familiaris; identical to SEQ ID NO: 4540

SEQ ID NO: 214648 - DNA, 501 bp, Canis familiaris; identical to SEQ ID NO: 4541

SEQ ID NO: 214649 - DNA, 502 bp, Canis familiaris; identical to SEQ ID NO: 4542

SEQ ID NO: 214650 - DNA, 382 bp, Canis familiaris; identical to SEQ ID NO: 4543

SEQ ID NO: 214651 - DNA, 343 bp, Canis familiaris; identical to SEQ ID NO: 4544

SEQ ID NO: 214652 - DNA, 510 bp, Canis familiaris; identical to SEQ ID NO: 4545

SEQ ID NO: 214653 - DNA, 511 bp, Canis familiaris; identical to SEQ ID NO: 4546
  misc_feature (15)..(15): n is a, c, g, or t

SEQ ID NO: 214654 - DNA, 111 bp, Canis familiaris; identical to SEQ ID NO: 4547
  misc_feature (19)..(20): n is a, c, g, or t

SEQ ID NO: 214655 - DNA, 135 bp, Canis familiaris; identical to SEQ ID NO: 4548
  misc_feature (39)..(39): n is a, c, g, or t

SEQ ID NO: 214656 - DNA, 506 bp, Canis familiaris; identical to SEQ ID NO: 4549

SEQ ID NO: 214657 - DNA, 313 bp, Canis familiaris; identical to SEQ ID NO: 4550

SEQ ID NO: 214658 - DNA, 304 bp, Canis familiaris; identical to SEQ ID NO: 4551

SEQ ID NO: 214659 - DNA, 504 bp, Canis familiaris; identical to SEQ ID NO: 4552

SEQ ID NO: 214660 - DNA, 150 bp, Canis familiaris; identical to SEQ ID NO: 4553

SEQ ID NO: 214661 - DNA, 406 bp, Canis familiaris; identical to SEQ ID NO: 4554

SEQ ID NO: 214662 - DNA, 504 bp, Canis familiaris; identical to SEQ ID NO: 4555

SEQ ID NO: 214663 - DNA, 217 bp, Canis familiaris; identical to SEQ ID NO: 4556

SEQ ID NO: 214664 - DNA, 500 bp, Canis familiaris; identical to SEQ ID NO: 4557

SEQ ID NO: 214665 - DNA, 511 bp, Canis familiaris; identical to SEQ ID NO: 4558

SEQ ID NO: 214666 - DNA, 200 bp, Canis familiaris; identical to SEQ ID NO: 4559

SEQ ID NO: 214667 - DNA, 358 bp, Canis familiaris; identical to SEQ ID NO: 4560

SEQ ID NO: 214668 - DNA, 338 bp, Canis familiaris; identical to SEQ ID NO: 4561
  misc_feature (52)..(52): n is a, c, g, or t
  misc_feature (250)..(250): n is a, c, g, or t

SEQ ID NO: 214669 - DNA, 363 bp, Canis familiaris; identical to SEQ ID NO: 4562

SEQ ID NO: 214670 - DNA, 346 bp, Canis familiaris; identical to SEQ ID NO: 4563

SEQ ID NO: 214671 - DNA, 158 bp, Canis familiaris; identical to SEQ ID NO: 4564

SEQ ID NO: 214672 - DNA, 342 bp, Canis familiaris; identical to SEQ ID NO: 4565

SEQ ID NO: 214673 - DNA, 406 bp, Canis familiaris; identical to SEQ ID NO: 4566

SEQ ID NO: 214674 - DNA, 341 bp, Canis familiaris; identical to SEQ ID NO: 4567

SEQ ID NO: 214675 - DNA, 394 bp, Canis familiaris; identical to SEQ ID NO: 4568

SEQ ID NO: 214676 - DNA, 371 bp, Canis familiaris; identical to SEQ ID NO: 4569

SEQ ID NO: 214677 - DNA, 377 bp, Canis familiaris; identical to SEQ ID NO: 4570

SEQ ID NO: 214678 - DNA, 365 bp, Canis familiaris; identical to SEQ ID NO: 4571

SEQ ID NO: 214679 - DNA, 421 bp, Canis familiaris; identical to SEQ ID NO: 4572

SEQ ID NO: 214680 - DNA, 380 bp, Canis familiaris; identical to SEQ ID NO: 4573

SEQ ID NO: 214681 - DNA, 406 bp, Canis familiaris; identical to SEQ ID NO: 4574

SEQ ID NO: 214682 - DNA, 395 bp, Canis familiaris; identical to SEQ ID NO: 4575

SEQ ID NO: 214683 - DNA, 302 bp, Canis familiaris; identical to SEQ ID NO: 4576

SEQ ID NO: 214684 - DNA, 329 bp, Canis familiaris; identical to SEQ ID NO: 4577
  misc_feature (294)..(294): n is a, c, g, or t

SEQ ID NO: 214685 - DNA, 391 bp, Canis familiaris; identical to SEQ ID NO: 4578

SEQ ID NO: 214686 - DNA, 420 bp, Canis familiaris; identical to SEQ ID NO: 4579

SEQ ID NO: 214687 - DNA, 430 bp, Canis familiaris; identical to SEQ ID NO: 4580
  misc_feature (398)..(398): n is a, c, g, or t

SEQ ID NO: 214688 - DNA, 386 bp, Canis familiaris; identical to SEQ ID NO: 4581

SEQ ID NO: 214689 - DNA, 344 bp, Canis familiaris; identical to SEQ ID NO: 4582

SEQ ID NO: 214690 - DNA, 385 bp, Canis familiaris; identical to SEQ ID NO: 4583

SEQ ID NO: 214691 - DNA, 321 bp, Canis familiaris; identical to SEQ ID NO: 4584

SEQ ID NO: 214692 - DNA, 365 bp, Canis familiaris; identical to SEQ ID NO: 4585

SEQ ID NO: 214693 - DNA, 406 bp, Canis familiaris; identical to SEQ ID NO: 4586

SEQ ID NO: 214694 - DNA, 219 bp, Canis familiaris; identical to SEQ ID NO: 4587

SEQ ID NO: 214695 - DNA, 439 bp, Canis familiaris; identical to SEQ ID NO: 4588

SEQ ID NO: 214696 - DNA, 423 bp, Canis familiaris; identical to SEQ ID NO: 4589

SEQ ID NO: 214697 - DNA, 425 bp, Canis familiaris; identical to SEQ ID NO: 4590

SEQ ID NO: 214698 - DNA, 368 bp, Canis familiaris; identical to SEQ ID NO: 4591

SEQ ID NO: 214699 - DNA, 416 bp, Canis familiaris; identical to SEQ ID NO: 4592

SEQ ID NO: 214700 - DNA, 449 bp, Canis familiaris; identical to SEQ ID NO: 4593

SEQ ID NO: 214701 - DNA, 445 bp, Canis familiaris; identical to SEQ ID NO: 4594

SEQ ID NO: 214702 - DNA, 401 bp, Canis familiaris; identical to SEQ ID NO: 4595

SEQ ID NO: 214703 - DNA, 423 bp, Canis familiaris; identical to SEQ ID NO: 4596

SEQ ID NO: 214704 - DNA, 417 bp, Canis familiaris; identical to SEQ ID NO: 4597

SEQ ID NO: 214705 - DNA, 396 bp, Canis familiaris; identical to SEQ ID NO: 4598
  misc_feature (323)..(323): n is a, c, g, or t

SEQ ID NO: 214706 - DNA, 407 bp, Canis familiaris; identical to SEQ ID NO: 4599

SEQ ID NO: 214707 - DNA, 418 bp, Canis familiaris; identical to SEQ ID NO: 4600

SEQ ID NO: 214708 - DNA, 383 bp, Canis familiaris; identical to SEQ ID NO: 4601

SEQ ID NO: 214709 - DNA, 125 bp, Canis familiaris; identical to SEQ ID NO: 4602

SEQ ID NO: 214710 - DNA, 406 bp, Canis familiaris; identical to SEQ ID NO: 4603

SEQ ID NO: 214711 - DNA, 403 bp, Canis familiaris; identical to SEQ ID NO: 4604

SEQ ID NO: 214712 - DNA, 404 bp, Canis familiaris; identical to SEQ ID NO: 4605

SEQ ID NO: 214713 - DNA, 384 bp, Canis familiaris; identical to SEQ ID NO: 4606

SEQ ID NO: 214714 - DNA, 352 bp, Canis familiaris; identical to SEQ ID NO: 4607

SEQ ID NO: 214715 - DNA, 353 bp, Canis familiaris; identical to SEQ ID NO: 4608

SEQ ID NO: 214716 - DNA, 389 bp, Canis familiaris; identical to SEQ ID NO: 4609

SEQ ID NO: 214717 - DNA, 396 bp, Canis familiaris; identical to SEQ ID NO: 4610

SEQ ID NO: 214718 - DNA, 447 bp, Canis familiaris; identical to SEQ ID NO: 4611

SEQ ID NO: 214719 - DNA, 200 bp, Canis familiaris; identical to SEQ ID NO: 4612

SEQ ID NO: 214720 - DNA, 223 bp, Canis familiaris; identical to SEQ ID NO: 4613
  misc_feature (209)..(209): n is a, c, g, or t
  misc_feature (213)..(213): n is a, c, g, or t
  misc_feature (216)..(217): n is a, c, g, or t

SEQ ID NO: 214721 - DNA, 368 bp, Canis familiaris; identical to SEQ ID NO: 4614

SEQ ID NO: 214722 - DNA, 368 bp, Canis familiaris; identical to SEQ ID NO: 4615

SEQ ID NO: 214723 - DNA, 416 bp, Canis familiaris; identical to SEQ ID NO: 4616

SEQ ID NO: 214724 - DNA, 423 bp, Canis familiaris; identical to SEQ ID NO: 4617

SEQ ID NO: 214725 - DNA, 432 bp, Canis familiaris; identical to SEQ ID NO: 4618

SEQ ID NO: 214726 - DNA, 368 bp, Canis familiaris; identical to SEQ ID NO: 4619

SEQ ID NO: 214727 - DNA, 448 bp, Canis familiaris; identical to SEQ ID NO: 4620
  misc_feature (441)..(441): n is a, c, g, or t

SEQ ID NO: 214728 - DNA, 400 bp, Canis familiaris; identical to SEQ ID NO: 4621

SEQ ID NO: 214729 - DNA, 413 bp, Canis familiaris; identical to SEQ ID NO: 4622

SEQ ID NO: 214730 - DNA, 208 bp, Canis familiaris; identical to SEQ ID NO: 4623

SEQ ID NO: 214731 - DNA, 440 bp, Canis familiaris; identical to SEQ ID NO: 4624

SEQ ID NO: 214732 - DNA, 325 bp, Canis familiaris; identical to SEQ ID NO: 4625

SEQ ID NO: 214733 - DNA, 377 bp, Canis familiaris; identical to SEQ ID NO: 4626

SEQ ID NO: 214734 - DNA, 384 bp, Canis familiaris; identical to SEQ ID NO: 4627
  misc_feature (111)..(111): n is a, c, g, or t

SEQ ID NO: 214735 - DNA, 432 bp, Canis familiaris; identical to SEQ ID NO: 4628

SEQ ID NO: 214736 - DNA, 424 bp, Canis familiaris; identical to SEQ ID NO: 4629

SEQ ID NO: 214737 - DNA, 397 bp, Canis familiaris; identical to SEQ ID NO: 4630

SEQ ID NO: 214738 - DNA, 289 bp, Canis familiaris; identical to SEQ ID NO: 4631

SEQ ID NO: 214739 - DNA, 348 bp, Canis familiaris; identical to SEQ ID NO: 4632

SEQ ID NO: 214740 - DNA, 397 bp, Canis familiaris; identical to SEQ ID NO: 4633

SEQ ID NO: 214741 - DNA, 422 bp, Canis familiaris; identical to SEQ ID NO: 4634

SEQ ID NO: 214742 - DNA, 432 bp, Canis familiaris; identical to SEQ ID NO: 4635

SEQ ID NO: 214743 - DNA, 408 bp, Canis familiaris; identical to SEQ ID NO: 4636

SEQ ID NO: 214744 - DNA, 368 bp, Canis familiaris; identical to SEQ ID NO: 4637

SEQ ID NO: 214745 - DNA, 424 bp, Canis familiaris; identical to SEQ ID NO: 4638

SEQ ID NO: 214746 - DNA, 400 bp, Canis familiaris; identical to SEQ ID NO: 4639
  misc_feature (357)..(357): n is a, c, g, or t

SEQ ID NO: 214747 - DNA, 392 bp, Canis familiaris; identical to SEQ ID NO: 4640
  misc_feature (373)..(373): n is a, c, g, or t

SEQ ID NO: 214748 - DNA, 395 bp, Canis familiaris; identical to SEQ ID NO: 4641

SEQ ID NO: 214749 - DNA, 425 bp, Canis familiaris; identical to SEQ ID NO: 4642

SEQ ID NO: 214750 - DNA, 392 bp, Canis familiaris; identical to SEQ ID NO: 4643

SEQ ID NO: 214751 - DNA, 385 bp, Canis familiaris; identical to SEQ ID NO: 4644

SEQ ID NO: 214752 - DNA, 504 bp, Canis familiaris; identical to SEQ ID NO: 4645
  misc_feature (438)..(438): n is a, c, g, or t

SEQ ID NO: 214753 - DNA, 449 bp, Canis familiaris; identical to SEQ ID NO: 4646

SEQ ID NO: 214754 - DNA, 305 bp, Canis familiaris; identical to SEQ ID NO: 4647
  misc_feature (29)..(29): n is a, c, g, or t
  misc_feature (45)..(45): n is a, c, g, or t
  misc_feature (48)..(48): n is a, c, g, or t
  misc_feature (67)..(67): n is a, c, g, or t
  misc_feature (71)..(71): n is a, c, g, or t
  misc_feature (76)..(76): n is a, c, g, or t
  misc_feature (203)..(203): n is a, c, g, or t
  misc_feature (207)..(207): n is a, c, g, or t
  misc_feature (278)..(278): n is a, c, g, or t
  misc_feature (281)..(281): n is a, c, g, or t

SEQ ID NO: 214755 - DNA, 581 bp, Canis familiaris; identical to SEQ ID NO: 4648
  misc_feature (18)..(18): n is a, c, g, or t
  misc_feature (48)..(48): n is a, c, g, or t
  misc_feature (50)..(50): n is a, c, g, or t
  misc_feature (106)..(106): n is a, c, g, or t
  misc_feature (224)..(224): n is a, c, g, or t
  misc_feature (240)..(240): n is a, c, g, or t
  misc_feature (253)..(253): n is a, c, g, or t
  misc_feature (297)..(297): n is a, c, g, or t
  misc_feature (309)..(309): n is a, c, g, or t
  misc_feature (321)..(321): n is a, c, g, or t
  misc_feature (328)..(328): n is a, c, g, or t
  misc_feature (350)..(350): n is a, c, g, or t
  misc_feature (378)..(378): n is a, c, g, or t
  misc_feature (380)..(380): n is a, c, g, or t
  misc_feature (414)..(414): n is a, c, g, or t
  misc_feature (482)..(482): n is a, c, g, or t
  misc_feature (489)..(489): n is a, c, g, or t
  misc_feature (507)..(508): n is a, c, g, or t
  misc_feature (517)..(517): n is a, c, g, or t

SEQ ID NO: 214756 - DNA, 442 bp, Canis familiaris; identical to SEQ ID NO: 4649
  misc_feature (112)..(112): n is a, c, g, or t
  misc_feature (198)..(198): n is a, c, g, or t
  misc_feature (312)..(312): n is a, c, g, or t

SEQ ID NO: 214757 - DNA, 560 bp, Canis familiaris; identical to SEQ ID NO: 4650
  misc_feature (443)..(443): n is a, c, g, or t
  misc_feature (522)..(522): n is a, c, g, or t
  misc_feature (543)..(543): n is a, c, g, or t

SEQ ID NO: 214758 - DNA, 420 bp, Canis familiaris; identical to SEQ ID NO: 4651

SEQ ID NO: 214759 - DNA, 394 bp, Canis familiaris; identical to SEQ ID NO: 4652
  misc_feature (15)..(15): n is a, c, g, or t
  misc_feature (17)..(17): n is a, c, g, or t
  misc_feature (60)..(60): n is a, c, g, or t
  misc_feature (277)..(277): n is a, c, g, or t
  misc_feature (372)..(372): n is a, c, g, or t

SEQ ID NO: 214760 - DNA, 471 bp, Canis familiaris; identical to SEQ ID NO: 4653
  misc_feature (46)..(46): n is a, c, g, or t
  misc_feature (78)..(78): n is a, c, g, or t
  misc_feature (87)..(87): n is a, c, g, or t
  misc_feature (91)..(91): n is a, c, g, or t
  misc_feature (443)..(443): n is a, c, g, or t

SEQ ID NO: 214761 - DNA, 600 bp, Canis familiaris
  misc_feature (451)..(451): n is a, c, g, or t
  misc_feature (542)..(542): n is a, c, g, or t
  misc_feature (561)..(561): n is a, c, g, or t
  misc_feature (594)..(594): n is a, c, g, or t
ctcagtgctccagctgcagtcagactcagaacttgggcgaagactgcacaggctgggtgtgtcgaaggttacccaagtggatttcctgcccagggaagttgtgtcctactccaaggagacccagactcctctggctacacatcagtctgaagaggacgaggaagatgaggaaatggtagaacctaaagttggccacgattcagaactggaaaatcaagaccaaaagcaggaggtgaaggaagccccaccacgagagctgacagaggaagagaaacagcagattcttcattcagaggagtttctcatcttttttgatcggacaatccgggtaattgaaagagcgctagcagaagactctgacatcttctttgactacagcggtcgggaggtagagggaaaaaaatggggatgtccagctggagccaacctttttttaatcgtaagttttacnatgagcattgtccaagcatcagtagtccttgtttggactggtttttcaatccctgagcttgtggtggttctacacaacacaggatgctctnatgaaccaaatggagtggncttggttggacctgaagttaagaaacccccccnaatcgt

SEQ ID NO: 214762 - DNA, 401 bp, Canis familiaris; identical to SEQ ID NO: 4655
  misc_feature (12)..(12): n is a, c, g, or t
  misc_feature (22)..(22): n is a, c, g, or t
  misc_feature (33)..(33): n is a, c, g, or t
  misc_feature (39)..(39): n is a, c, g, or t
  misc_feature (196)..(196): n is a, c, g, or t
  misc_feature (293)..(293): n is a, c, g, or t
  misc_feature (314)..(314): n is a, c, g, or t
  misc_feature (321)..(321): n is a, c, g, or t
  misc_feature (349)..(349): n is a, c, g, or t
  misc_feature (374)..(374): n is a, c, g, or t

SEQ ID NO: 214763 - DNA, 600 bp, Canis familiaris
  misc_feature (334)..(334): n is a, c, g, or t
  misc_feature (336)..(336): n is a, c, g, or t
  misc_feature (385)..(385): n is a, c, g, or t
  misc_feature (409)..(409): n is a, c, g, or t
  misc_feature (419)..(419): n is a, c, g, or t
  misc_feature (437)..(437): n is a, c, g, or t
  misc_feature (470)..(470): n is a, c, g, or t
  misc_feature (513)..(513): n is a, c, g, or t
  misc_feature (525)..(525): n is a, c, g, or t
  misc_feature (528)..(528): n is a, c, g, or t
  misc_feature (539)..(539): n is a, c, g, or t
  misc_feature (558)..(558): n is a, c, g, or t
cctgagctatgccaaggagttccagctgtctgcccagctgtgtgagaagctggggaagataagagatgctgcctatttctataagcgaagccagtgctacaaagatgctttcagatgctttgagcagatccaggaatttgatctagcactcaaaatgtactgtcaagaggagctttttgaagaagctgctattgcagtggaaaagtacgaagaaatgctgagggccaagacccttcccatatccaagctatcttattctgccagtcagttttacctggaagctgcagcaaagtacctgagtgcaaataagatcaaggagatgatggctggtctntncaaacttgacataaaaaaacagcttgtggttcttgaagtttcgtggacnactagcggaagctgaaacttgctnaacaaggaangtcggaaagaaaagcttnctttcttatgaacacatggcttgtttgttggangctgccaggctcacttgttacaaggactttcaggcctcgtgtntgttggggctgnccncctaaactggncagggatttggtgtagaanataccaggccattttggaaaagcccttacctttgtgtaaacc

SEQ ID NO: 214764 - DNA, 436 bp, Canis familiaris; identical to SEQ ID NO: 4657
  misc_feature (403)..(403): n is a, c, g, or t

SEQ ID NO: 214765 - DNA, 361 bp, Canis familiaris; identical to SEQ ID NO: 4658

SEQ ID NO: 214766 - DNA, 420 bp, Canis familiaris; identical to SEQ ID NO: 4659
  misc_feature (101)..(101): n is a, c, g, or t
  misc_feature (416)..(416): n is a, c, g, or t

SEQ ID NO: 214767 - DNA, 432 bp, Canis familiaris; identical to SEQ ID NO: 4660

SEQ ID NO: 214768 - DNA, 414 bp, Canis familiaris; identical to SEQ ID NO: 4661
  misc_feature (400)..(400): n is a, c, g, or t

SEQ ID NO: 214769 - DNA, 489 bp, Canis familiaris; identical to SEQ ID NO: 4662
  misc_feature (465)..(465): n is a, c, g, or t
  misc_feature (475)..(475): n is a, c, g, or t

SEQ ID NO: 214770 - DNA, 496 bp, Canis familiaris; identical to SEQ ID NO: 4663
  misc_feature (482)..(482): n is a, c, g, or t

SEQ ID NO: 214771 - DNA, 130 bp, Canis familiaris; identical to SEQ ID NO: 4664

SEQ ID NO: 214772 - DNA, 377 bp, Canis familiaris; identical to SEQ ID NO: 4665

SEQ ID NO: 214773 - DNA, 305 bp, Canis familiaris; identical to SEQ ID NO: 4666

SEQ ID NO: 214774 - DNA, 471 bp, Canis familiaris; identical to SEQ ID NO: 4667

SEQ ID NO: 214775 - DNA, 398 bp, Canis familiaris; identical to SEQ ID NO: 4668

SEQ ID NO: 214776 - DNA, 430 bp, Canis familiaris; identical to SEQ ID NO: 4669

SEQ ID NO: 214777 - DNA, 246 bp, Canis familiaris; identical to SEQ ID NO: 4670
  misc_feature (140)..(140): n is a, c, g, or t
  misc_feature (148)..(148): n is a, c, g, or t
  misc_feature (170)..(170): n is a, c, g, or t

SEQ ID NO: 214778 - DNA, 368 bp, Canis familiaris; identical to SEQ ID NO: 4671
  misc_feature (126)..(126): n is a, c, g, or t
  misc_feature (146)..(146): n is a, c, g, or t
  misc_feature (148)..(148): n is a, c, g, or t
  misc_feature (231)..(231): n is a, c, g, or t
  misc_feature (294)..(294): n is a, c, g, or t
  misc_feature (349)..(349): n is a, c, g, or t

SEQ ID NO: 214779 - DNA, 410 bp, Canis familiaris; identical to SEQ ID NO: 4672

SEQ ID NO: 214780 - DNA, 403 bp, Canis familiaris; identical to SEQ ID NO: 4673
  misc_feature (236)..(236): n is a, c, g, or t

SEQ ID NO: 214781 - DNA, 396 bp, Canis familiaris; identical to SEQ ID NO: 4674

SEQ ID NO: 214782 - DNA, 366 bp, Canis familiaris; identical to SEQ ID NO: 4675
  misc_feature (331)..(331): n is a, c, g, or t

SEQ ID NO: 214783 - DNA, 568 bp, Canis familiaris; identical to SEQ ID NO: 4676
  misc_feature (462)..(462): n is a, c, g, or t
  misc_feature (465)..(465): n is a, c, g, or t
  misc_feature (527)..(527): n is a, c, g, or t
  misc_feature (544)..(544): n is a, c, g, or t
  misc_feature (566)..(566): n is a, c, g, or t

SEQ ID NO: 214784 - DNA, 274 bp, Canis familiaris; identical to SEQ ID NO: 4677

SEQ ID NO: 214785 - DNA, 486 bp, Canis familiaris; identical to SEQ ID NO: 4678
  misc_feature (253)..(253): n is a, c, g, or t
  misc_feature (475)..(475): n is a, c, g, or t

SEQ ID NO: 214786 - DNA, 473 bp, Canis familiaris; identical to SEQ ID NO: 4679

SEQ ID NO: 214787 - DNA, 476 bp, Canis familiaris; identical to SEQ ID NO: 4680
  misc_feature (443)..(443): n is a, c, g, or t

SEQ ID NO: 214788 - DNA, 442 bp, Canis familiaris; identical to SEQ ID NO: 4681

SEQ ID NO: 214789 - DNA, 600 bp, Canis familiaris
  misc_feature (388)..(388): n is a, c, g, or t
  misc_feature (401)..(401): n is a, c, g, or t
  misc_feature (451)..(451): n is a, c, g, or t
  misc_feature (467)..(467): n is a, c, g, or t
  misc_feature (482)..(483): n is a, c, g, or t
  misc_feature (492)..(492): n is a, c, g, or t
  misc_feature (526)..(526): n is a, c, g, or t
  misc_feature (568)..(568): n is a, c, g, or t
  misc_feature (592)..(592): n is a, c, g, or t
  misc_feature (597)..(597): n is a, c, g, or t
ctggaagccactgctaccatctgcccaacaccagtagtgccaacgtgtcacactgcccagttgaggcccttcccactcagtgcccctgtaccctcctggcccccaccctctgctctcactccccggggggactccctcagatgaggccccttcctcctggaagccgaggctgaggagggtggagcccggccctggggaaggcagagccggggtctgatcgctttgagggatgctctgtgcgcgtctctcgccacgtccgtctcagccactttcagccttacacttattgtagaacgaccacagcccctcactccgtatagcactttaaagtttacatggttttttgacccgcaggatctcatttgagcctcatatctgctcaagaggnagggagcactctnttttattttgaaaacaagaaaacggaagtgggccaaggccacaaggactnttgagacgccatattnatttggctttaacgnncttttggtncttattcccatgaccaaaaattataaacattgtntaaaaagtaaatccgggggagactggctgggtaaaaaggggncctcttttatactggactataacnatatncta

SEQ ID NO: 214790 - DNA, 600 bp, Canis familiaris
  misc_feature (413)..(413): n is a, c, g, or t
  misc_feature (416)..(416): n is a, c, g, or t
  misc_feature (433)..(433): n is a, c, g, or t
  misc_feature (503)..(503): n is a, c, g, or t
  misc_feature (531)..(531): n is a, c, g, or t
  misc_feature (553)..(553): n is a, c, g, or t
  misc_feature (570)..(570): n is a, c, g, or t
  misc_feature (584)..(584): n is a, c, g, or t
  misc_feature (592)..(592): n is a, c, g, or t
gacctcggttccaaatgaacttgtcactttcggacccagctctaagcaacggccagtggtctgcagtgtgcctcccagactcccgccagctgcggccccttctcactccgacaatgagtccatcattaagaggacatggtcgggtgaagagatggtgtgccccggtggagctacgatctggcccccaacttactccaggaaggaatgctgggaatacccccacactgaaatgacccctggccctctgccgccatcgcctcaccagcaccagatccaacctgtgatgccggacccaagtggcctctatgggggctttccctttccactggagctggaaaacaagcgggcacccctcccaccccgttatagcaaccagaacctggaagatttgatgcccacggcccccagtcccnggnacactggtggccctgtntaatgggtacacaagcataagttattaccattacagttccagcagggaggggggagggcctgctggaaangggggttcaaaggggggggatgcgcctnaaccgagctggaccttttatgntgattgggaggttgggntggcatccaaaggnggggcagnccaggttc

SEQ ID NO: 214791 - DNA, 486 bp, Canis familiaris; identical to SEQ ID NO: 4684
  misc_feature (436)..(436): n is a, c, g, or t
  misc_feature (449)..(449): n is a, c, g, or t

SEQ ID NO: 214792 - DNA, 557 bp, Canis familiaris; identical to SEQ ID NO: 4685
  misc_feature (427)..(427): n is a, c, g, or t
  misc_feature (450)..(450): n is a, c, g, or t
  misc_feature (453)..(453): n is a, c, g, or t
  misc_feature (498)..(498): n is a, c, g, or t
  misc_feature (550)..(550): n is a, c, g, or t

SEQ ID NO: 214793 - DNA, 330 bp, Canis familiaris; identical to SEQ ID NO: 4686
  misc_feature (49)..(49): n is a, c, g, or t

SEQ ID NO: 214794 - DNA, 504 bp, Canis familiaris; identical to SEQ ID NO: 4687
  misc_feature (405)..(405): n is a, c, g, or t
  misc_feature (434)..(434): n is a, c, g, or t
  misc_feature (437)..(437): n is a, c, g, or t
  misc_feature (452)..(452): n is a, c, g, or t
  misc_feature (467)..(467): n is a, c, g, or t
  misc_feature (476)..(476): n is a, c, g, or t
  misc_feature (479)..(479): n is a, c, g, or t

SEQ ID NO: 214795 - DNA, 600 bp, Canis familiaris
  misc_feature (280)..(280): n is a, c, g, or t
  misc_feature (282)..(282): n is a, c, g, or t
  misc_feature (364)..(364): n is a, c, g, or t
  misc_feature (420)..(420): n is a, c, g, or t
  misc_feature (458)..(458): n is a, c, g, or t
  misc_feature (471)..(471): n is a, c, g, or t
  misc_feature (477)..(477): n is a, c, g, or t
  misc_feature (494)..(494): n is a, c, g, or t
  misc_feature (503)..(503): n is a, c, g, or t
  misc_feature (528)..(529): n is a, c, g, or t
  misc_feature (539)..(539): n is a, c, g, or t
  misc_feature (561)..(562): n is a, c, g, or t
  misc_feature (577)..(577): n is a, c, g, or t
  misc_feature (589)..(589): n is a, c, g, or t
aggaaggccaagcttgaggagaactcggccttccttcagttcaactggaaggctgatgtagtggaatcctggatcggtgagaaggaaaacagcctgaagacagacgattatggccgagacctgtcctccgtgcagactctcctcaccaaacaggaaacttttgacgctggtctacaggccttccagcaggagggcattgccaacatcactgccctcaaagatcagctgctggccgccaagcacattcagtcaaaggccattgaagcccggcacgcctctntnatgaagagatggagccagcttctggccaactcggcccccccaagaagaacttgttggaggcacagagtcacttccgcaaggnggaagaccttttcttgcctttgccaaaaaggcatcggccttaacaagctggtttgnaaacccgaaaaggatctgctgatctgtgcgttgaactncctggaggagatnaaactnttgggtgaggccacgancctttcgtnatccttaattttgccaggcgcttanncaatggttanttgaccgcaaacaaaacttcgnnggcttaccctaaccngttacatgaggnccggaggaagg

SEQ ID NO: 214796 - DNA, 600 bp, Canis familiaris
  misc_feature (308)..(308): n is a, c, g, or t
  misc_feature (335)..(335): n is a, c, g, or t
  misc_feature (339)..(339): n is a, c, g, or t
  misc_feature (356)..(356): n is a, c, g, or t
  misc_feature (364)..(364): n is a, c, g, or t
  misc_feature (381)..(381): n is a, c, g, or t
  misc_feature (415)..(415): n is a, c, g, or t
  misc_feature (422)..(422): n is a, c, g, or t
  misc_feature (472)..(472): n is a, c, g, or t
  misc_feature (477)..(477): n is a, c, g, or t
  misc_feature (485)..(485): n is a, c, g, or t
  misc_feature (498)..(498): n is a, c, g, or t
  misc_feature (540)..(540): n is a, c, g, or t
  misc_feature (542)..(542): n is a, c, g, or t
  misc_feature (574)..(574): n is a, c, g, or t
gtatcgccaggggctggtcctggtcagagagcaggcaggtccgcccagctctcctgggcaagcgccatggtgaccaagcccaacaaggtccatccggcctgaggatcccggctgtgagcatggccctggaaagacccaccactggactcttcccttgagtcagaggttactcgtgatcccacctgtaccctagcatcaatgtgcaggggggtctgcaggtcaggagaatctctacagggcaattcccagtttcctaagaacgaaatgtgcaataaagcctgttctttgtctacttctcagcagcccangagatgtagcactggaagtggtttctnaaantcttcgtggtgcctgtngaagcaantgcctgtccaaccaagnctaacttgcacctgttttaaggaacttaacccgngtcccanagcttttacctggcacaggccatgctaggtactttgggcaaacatgtggncaggnatcctctntgtttttgataanaatatcttggttggcacatcccttggctagttccatgctaangntatcaagctaaaactgggggggggggggcttnggcttacaacaccattcatttttgca

SEQ ID NO: 214797 - DNA, 456 bp, Canis familiaris; identical to SEQ ID NO: 4690
  misc_feature (8)..(8): n is a, c, g, or t
  misc_feature (57)..(57): n is a, c, g, or t
  misc_feature (69)..(69): n is a, c, g, or t
  misc_feature (110)..(111): n is a, c, g, or t
  misc_feature (118)..(118): n is a, c, g, or t
  misc_feature (137)..(137): n is a, c, g, or t
  misc_feature (235)..(235): n is a, c, g, or t
  misc_feature (264)..(264): n is a, c, g, or t
  misc_feature (292)..(292): n is a, c, g, or t
  misc_feature (326)..(326): n is a, c, g, or t
  misc_feature (374)..(374): n is a, c, g, or t
  misc_feature (398)..(398): n is a, c, g, or t
  misc_feature (412)..(412): n is a, c, g, or t
  misc_feature (416)..(416): n is a, c, g, or t
  misc_feature (429)..(429): n is a, c, g, or t
  misc_feature (454)..(454): n is a, c, g, or t

SEQ ID NO: 214798 - DNA, 418 bp, Canis familiaris; identical to SEQ ID NO: 4691

SEQ ID NO: 214799 - DNA, 600 bp, Canis familiaris
  misc_feature (266)..(266): n is a, c, g, or t
  misc_feature (325)..(325): n is a, c, g, or t
  misc_feature (401)..(401): n is a, c, g, or t
  misc_feature (451)..(451): n is a, c, g, or t
  misc_feature (477)..(477): n is a, c, g, or t
  misc_feature (485)..(485): n is a, c, g, or t
  misc_feature (527)..(527): n is a, c, g, or t
  misc_feature (550)..(550): n is a, c, g, or t
  misc_feature (566)..(566): n is a, c, g, or t
  misc_feature (575)..(575): n is a, c, g, or t
aattgtgggaagtccaggacaaagaggtcgtccagggaaaaagggtgacaaaggacaaatagggcccacaggagaaattggaaacagaggtgctcctggacaaattggggaaagtggtcctaagggtgccagaggaactagaggtgctgtgggacatttaggattgattggacctgatggagaaccaggaattccaggatataggggtcatcagggtcaaccaggacttcctgggttgccaggacctaaaggagaaaagggttatncaggagaagatagcacagtactaggaccacctgggcctcgaggtgaaccaggtattatnggggaacaaggagagagaggagagccttgaaaaaaaggctattaaggtcatgttgggtttgccaggaccaaaaggngttcttggccaacaagggcccccagtgagccaggggaccaaggtgagcanggctaaaaggagaaagaggatttaangtcctaangggaaaaaaggactctggtcttttgaaacctgggattctggnttctgggctacccggcccaaagnattaaggttccctggnctgttggcnttagaaaatttgaaaatgggtccag

SEQ ID NO: 214800 - DNA, 409 bp, Canis familiaris; identical to SEQ ID NO: 4693

SEQ ID NO: 214801 - DNA, 335 bp, Canis familiaris; identical to SEQ ID NO: 4694
  misc_feature (216)..(216): n is a, c, g, or t
  misc_feature (329)..(329): n is a, c, g, or t

SEQ ID NO: 214802 - DNA, 292 bp, Canis familiaris; identical to SEQ ID NO: 4695

SEQ ID NO: 214803 - DNA, 372 bp, Canis familiaris; identical to SEQ ID NO: 4696
  misc_feature (213)..(213): n is a, c, g, or t
  misc_feature (295)..(295): n is a, c, g, or t
  misc_feature (325)..(325): n is a, c, g, or t
  misc_feature (335)..(335): n is a, c, g, or t
  misc_feature (352)..(352): n is a, c, g, or t
  misc_feature (357)..(357): n is a, c, g, or t

SEQ ID NO: 214804 - DNA, 235 bp, Canis familiaris; identical to SEQ ID NO: 4697

SEQ ID NO: 214805 - DNA, 377 bp, Canis familiaris; identical to SEQ ID NO: 4698

SEQ ID NO: 214806 - DNA, 480 bp, Canis familiaris; identical to SEQ ID NO: 4699
  misc_feature (26)..(26): n is a, c, g, or t
  misc_feature (146)..(146): n is a, c, g, or t
  misc_feature (398)..(398): n is a, c, g, or t

SEQ ID NO: 214807 - DNA, 363 bp, Canis familiaris; identical to SEQ ID NO: 4700

SEQ ID NO: 214808 - DNA, 442 bp, Canis familiaris; identical to SEQ ID NO: 4701
  misc_feature (405)..(405): n is a, c, g, or t

SEQ ID NO: 214809 - DNA, 399 bp, Canis familiaris; identical to SEQ ID NO: 4702

SEQ ID NO: 214810 - DNA, 430 bp, Canis familiaris; identical to SEQ ID NO: 4703
  misc_feature (365)..(365): n is a, c, g, or t
  misc_feature (408)..(408): n is a, c, g, or t

SEQ ID NO: 214811 - DNA, 444 bp, Canis familiaris; identical to SEQ ID NO: 4704

SEQ ID NO: 214812 - DNA, 453 bp, Canis familiaris; identical to SEQ ID NO: 4705
  misc_feature (410)..(410): n is a, c, g, or t
  misc_feature (431)..(431): n is a, c, g, or t
  misc_feature (443)..(443): n is a, c, g, or t

SEQ ID NO: 214813 - DNA, 410 bp, Canis familiaris; identical to SEQ ID NO: 4706

SEQ ID NO: 214814 - DNA, 256 bp, Canis familiaris; identical to SEQ ID NO: 4707

SEQ ID NO: 214815 - DNA, 314 bp, Canis familiaris; identical to SEQ ID NO: 4708
  misc_feature (131)..(131): n is a, c, g, or t
  misc_feature (215)..(215): n is a, c, g, or t
  misc_feature (306)..(306): n is a, c, g, or t
  misc_feature (312)..(312): n is a, c, g, or t

SEQ ID NO: 214816 - DNA, 417 bp, Canis familiaris; identical to SEQ ID NO: 4709

SEQ ID NO: 214817 - DNA, 417 bp, Canis familiaris; identical to SEQ ID NO: 4710

SEQ ID NO: 214818 - DNA, 414 bp, Canis familiaris; identical to SEQ ID NO: 4711
  misc_feature (406)..(406): n is a, c, g, or t

SEQ ID NO: 214819 - DNA, 385 bp, Canis familiaris; identical to SEQ ID NO: 4712

SEQ ID NO: 214820 - DNA, 600 bp, Canis familiaris
  misc_feature (169)..(169): n is a, c, g, or t
  misc_feature (298)..(298): n is a, c, g, or t
  misc_feature (333)..(333): n is a, c, g, or t
  misc_feature (387)..(387): n is a, c, g, or t
  misc_feature (403)..(404): n is a, c, g, or t
  misc_feature (425)..(425): n is a, c, g, or t
  misc_feature (428)..(428): n is a, c, g, or t
  misc_feature (440)..(440): n is a, c, g, or t
  misc_feature (451)..(451): n is a, c, g, or t
  misc_feature (471)..(471): n is a, c, g, or t
  misc_feature (478)..(478): n is a, c, g, or t
  misc_feature (483)..(483): n is a, c, g, or t
  misc_feature (524)..(524): n is a, c, g, or t
  misc_feature (527)..(527): n is a, c, g, or t
  misc_feature (550)..(550): n is a, c, g, or t
  misc_feature (559)..(559): n is a, c, g, or t
caaagagcactggaagacttgcttcgtggtactcagcaacgggatcctctaccagtatcctgaccgcaccgatgtcacccctctgctctcggtgaacatggggggggagcagtgcggtggctgtcggagggccaacaccacggatcggccccacgccttccaggtcatnctcgccgaccggccgtgcctggagctgagcgccgagagcgaggctgacatggccgactggatgcagcacctgtgccaggctgtgtccaaaggggtcatcccccagggggtaactcccagcccctgcatnccctgctgcctagtgatcaccgatgaccgctcttnacgtgccacgaggactggcagactagcttttttccgttcttggggacaagcaancttggccgaaattaanngccggtttcaccggccctggnaanggagactgtgtnttggacttttncaagaaaagcaagaagcctntcctgcntgggncatttacttgagctgacgtttgaactggaaccggtcctttntgngctgggctttggggggaaaacanataacaagnggacctgcccacaagcccttcggaaacctcacaagaagttt

SEQ ID NO: 214821 - DNA, 449 bp, Canis familiaris; identical to SEQ ID NO: 4714

SEQ ID NO: 214822 - DNA, 600 bp, Canis familiaris
  misc_feature (247)..(247): n is a, c, g, or t
  misc_feature (430)..(430): n is a, c, g, or t
  misc_feature (456)..(456): n is a, c, g, or t
  misc_feature (473)..(473): n is a, c, g, or t
  misc_feature (518)..(518): n is a, c, g, or t
  misc_feature (530)..(530): n is a, c, g, or t
  misc_feature (533)..(533): n is a, c, g, or t
  misc_feature (549)..(549): n is a, c, g, or t
  misc_feature (559)..(559): n is a, c, g, or t
  misc_feature (573)..(573): n is a, c, g, or t
  misc_feature (590)..(590): n is a, c, g, or t
  misc_feature (594)..(594): n is a, c, g, or t
cagatcgtattggaaaaaccaagagaacaggatatgaatctggagaatatgagatgcttggagagggtctaggagtgaaggagacaccccagcaaaagtaccagcgactactgcatgaggtccaagagctgacaactgaagttgagaaaatcaagacatcggtgaaggagtcagccactgaagagaagctgaccccagtggttttggctaagcagctggcagccttgaagcagcagctggttgcttnccacctggagaagctgctgggaccagatgcagctatcaaccttactgaccctgatggagctctggctaagcgcctgctgctgcagctggaagcaacaaaaaacagcaaaggaactggttcagggggaaagaccaccggtgggactcccgtagatagtaaccttgtcacttacgaactacattnttgggctgacaagacaaagttttttnaagttgccaaagtgcanaacttgaaaacgccttgcaaacttggaaccctgtccctttgatangacctcaaaatnccntttaacaaggtttaanggagcctgtnttatggagactgtnaactgttcaagcaaggngacncctgac

SEQ ID NO: 214823 - DNA, 576 bp, Canis familiaris; identical to SEQ ID NO: 4716
  misc_feature (328)..(328): n is a, c, g, or t
  misc_feature (412)..(412): n is a, c, g, or t
  misc_feature (415)..(415): n is a, c, g, or t
  misc_feature (440)..(440): n is a, c, g, or t
  misc_feature (478)..(478): n is a, c, g, or t
  misc_feature (481)..(481): n is a, c, g, or t
  misc_feature (523)..(523): n is a, c, g, or t

SEQ ID NO: 214824 - DNA, 600 bp, Canis familiaris
  misc_feature (334)..(334): n is a, c, g, or t
  misc_feature (343)..(343): n is a, c, g, or t
  misc_feature (373)..(373): n is a, c, g, or t
  misc_feature (383)..(383): n is a, c, g, or t
  misc_feature (392)..(392): n is a, c, g, or t
  misc_feature (411)..(411): n is a, c, g, or t
  misc_feature (416)..(416): n is a, c, g, or t
  misc_feature (422)..(422): n is a, c, g, or t
  misc_feature (450)..(450): n is a, c, g, or t
  misc_feature (511)..(511): n is a, c, g, or t
  misc_feature (527)..(527): n is a, c, g, or t
  misc_feature (535)..(535): n is a, c, g, or t
  misc_feature (554)..(554): n is a, c, g, or t
  misc_feature (565)..(565): n is a, c, g, or t
  misc_feature (567)..(567): n is a, c, g, or t
agtaggtagaatgtggaggaagaaataatttctttcaaaaatttgtggtaacgtataaaaaattttgctgtgtgtagatgctcaacagagtgggaggcagcttatttctgcccccagacattgtgaccttttgaaacaccagctctttgggaggtagaggaaagacacaggattctatgaagaaaagcaattagcattttctttaatgtatttctatcaaagagctactgctgaatcctgttctctaacccaaagggcagcgtaggtagtttcaggccccagaatattcagatattcctgttgtggtcttggtggggtgacaggatgcaaaaanaggattgangggcaaattggcatcaaaatggactgcctntttcacatancttacccangctggatgggatggatggngggcnctgaantccacacttttgcaagggttgaatcctntgctaaccttttctgggtccatacttttattggcttcctaaaatggttatgctgatactanttctgatggcccactnttcatggnaggagtagctttttttggnggcttaaaaananccttaaacaccttggctgggattcctttggtaa

SEQ ID NO: 214825 - DNA, 161 bp, Canis familiaris; identical to SEQ ID NO: 4718

SEQ ID NO: 214826 - DNA, 500 bp, Canis familiaris; identical to SEQ ID NO: 4719
  misc_feature (462)..(462): n is a, c, g, or t
  misc_feature (479)..(479): n is a, c, g, or t
  misc_feature (486)..(486): n is a, c, g, or t

SEQ ID NO: 214827 - DNA, 600 bp, Canis familiaris
  misc_feature (368)..(368): n is a, c, g, or t
  misc_feature (472)..(472): n is a, c, g, or t
  misc_feature (518)..(518): n is a, c, g, or t
  misc_feature (525)..(525): n is a, c, g, or t
  misc_feature (568)..(568): n is a, c, g, or t
  misc_feature (579)..(579): n is a, c, g, or t
  misc_feature (594)..(594): n is a, c, g, or t
atgcaatcctacatatacatacttaactcagatgggcaaatagagactagctctgggaaggaaggtgtggacaactacaaagaaaggttgggagcatgtgtggctcatgggaaataaccaggtcttaacagcacaaactgaattcatggaaaaatggcaaatttgagaagtctcccagtaagctggaacttttctggtttggttaactaacaaaaggtttcttgatttgtctcaacatttaaagccaaaggcttgggttcatgatttaggtgtcattgagtgtgggtacaatatttatatatggtgaattcagataaactttggtcaaagatggtctctggaaaaaaaatagaggcttgcattatggnaataaaaatttctgggctgttcctgggacatgctttaaaaaaaccaaaagtatatggatggttttttattttcatgggggtggggaaacaacatggtttttaanaatggtttgtaaagatgaaattaaaacttgttcacaagggataaanaagtgtntttgtgtaaaagttggagaactggatggatgcatatcacattntgggggggggncccttttttttgggnggaaaa

SEQ ID NO: 214828 - DNA, 600 bp, Canis familiaris
  misc_feature (319)..(319): n is a, c, g, or t
  misc_feature (369)..(369): n is a, c, g, or t
  misc_feature (387)..(387): n is a, c, g, or t
  misc_feature (398)..(398): n is a, c, g, or t
  misc_feature (413)..(413): n is a, c, g, or t
  misc_feature (418)..(418): n is a, c, g, or t
  misc_feature (430)..(430): n is a, c, g, or t
  misc_feature (484)..(484): n is a, c, g, or t
  misc_feature (497)..(497): n is a, c, g, or t
  misc_feature (505)..(505): n is a, c, g, or t
  misc_feature (521)..(521): n is a, c, g, or t
  misc_feature (533)..(533): n is a, c, g, or t
  misc_feature (557)..(557): n is a, c, g, or t
  misc_feature (573)..(573): n is a, c, g, or t
  misc_feature (585)..(585): n is a, c, g, or t
  misc_feature (594)..(594): n is a, c, g, or t
gctctgtcctggacctggtcaactatttcctttcccccgagaggctgacggcggagaaccgctactactgcgagccctgtgcctcgctgcaggacgccgagaaggcggtggagctgagccaggggccgcgctacctcatcctgaccctgctgcgcttctccttcgacctgcgcaccatgcggcgccgcaagatcctggacgacgtctccatccccttgctgctgcgcctgccgctggcggggggccgcggccaggcctacgacctctgcagcgtggtcgtgcactcgggagtgtcctccgagagcggcactactactgntatgccgcgagggcgccgccgcccggccccttttttggtgcttgccgaanggcccagcccgaaacaanggtatttgttnaacgacactcggggnccttntctcttcgagtntgtaagaacgtaactctttttcccaagaaacgggctatgtgctttttccggaanggcctggggaggngcccgagntgagccaacttcccanaaggcggacggngccaccctcacaaaaattgatggnggcatttcaaaaaaanatctttacctgnggacagganaagagg

SEQ ID NO: 214829 - DNA, 392 bp, Canis familiaris; identical to SEQ ID NO: 4722

SEQ ID NO: 214830 - DNA, 516 bp, Canis familiaris; identical to SEQ ID NO: 4723
  misc_feature (18)..(18): n is a, c, g, or t
  misc_feature (42)..(42): n is a, c, g, or t
  misc_feature (85)..(85): n is a, c, g, or t
  misc_feature (89)..(89): n is a, c, g, or t
  misc_feature (128)..(128): n is a, c, g, or t
  misc_feature (166)..(166): n is a, c, g, or t
  misc_feature (170)..(170): n is a, c, g, or t
  misc_feature (184)..(184): n is a, c, g, or t
  misc_feature (197)..(197): n is a, c, g, or t
  misc_feature (269)..(269): n is a, c, g, or t
  misc_feature (302)..(302): n is a, c, g, or t
  misc_feature (367)..(367): n is a, c, g, or t
  misc_feature (371)..(371): n is a, c, g, or t
  misc_feature (393)..(393): n is a, c, g, or t
  misc_feature (436)..(436): n is a, c, g, or t
  misc_feature (458)..(458): n is a, c, g, or t
  misc_feature (468)..(468): n is a, c, g, or t
  misc_feature (482)..(482): n is a, c, g, or t
  misc_feature (490)..(490): n is a, c, g, or t

SEQ ID NO: 214831 - DNA, 598 bp, Canis familiaris; identical to SEQ ID NO: 4724
  misc_feature (401)..(401): n is a, c, g, or t
  misc_feature (456)..(456): n is a, c, g, or t
  misc_feature (515)..(515): n is a, c, g, or t
  misc_feature (526)..(526): n is a, c, g, or t
  misc_feature (544)..(545): n is a, c, g, or t
  misc_feature (587)..(587): n is a, c, g, or t

SEQ ID NO: 214832 - DNA, 285 bp, Canis familiaris; identical to SEQ ID NO: 4725

SEQ ID NO: 214833 - DNA, 419 bp, Canis familiaris; identical to SEQ ID NO: 4726
  misc_feature (64)..(64): n is a, c, g, or t
  misc_feature (333)..(333): n is a, c, g, or t
  misc_feature (390)..(390): n is a, c, g, or t
  misc_feature (409)..(409): n is a, c, g, or t

SEQ ID NO: 214834 - DNA, 504 bp, Canis familiaris; identical to SEQ ID NO: 4727
  misc_feature (442)..(442): n is a, c, g, or t
  misc_feature (498)..(498): n is a, c, g, or t

SEQ ID NO: 214835 - DNA, 558 bp, Canis familiaris; identical to SEQ ID NO: 4728
  misc_feature (268)..(268): n is a, c, g, or t
  misc_feature (372)..(372): n is a, c, g, or t
  misc_feature (426)..(426): n is a, c, g, or t
  misc_feature (445)..(445): n is a, c, g, or t
  misc_feature (478)..(478): n is a, c, g, or t
  misc_feature (490)..(490): n is a, c, g, or t
  misc_feature (506)..(506): n is a, c, g, or t
  misc_feature (538)..(539): n is a, c, g, or t
  misc_feature (549)..(549): n is a, c, g, or t

SEQ ID NO: 214836 - DNA, 495 bp, Canis familiaris; identical to SEQ ID NO: 4729
  misc_feature (388)..(388): n is a, c, g, or t
  misc_feature (398)..(398): n is a, c, g, or t
  misc_feature (407)..(407): n is a, c, g, or t
  misc_feature (423)..(423): n is a, c, g, or t
  misc_feature (428)..(428): n is a, c, g, or t
  misc_feature (493)..(493): n is a, c, g, or t

SEQ ID NO: 214837 - DNA, 523 bp, Canis familiaris; identical to SEQ ID NO: 4730
  misc_feature (385)..(385): n is a, c, g, or t
  misc_feature (408)..(408): n is a, c, g, or t
  misc_feature (502)..(502): n is a, c, g, or t

SEQ ID NO: 214838 - DNA, 570 bp, Canis familiaris; identical to SEQ ID NO: 4731
  misc_feature (304)..(304): n is a, c, g, or t
  misc_feature (310)..(310): n is a, c, g, or t
  misc_feature (383)..(383): n is a, c, g, or t
  misc_feature (405)..(405): n is a, c, g, or t
  misc_feature (430)..(430): n is a, c, g, or t
  misc_feature (452)..(452): n is a, c, g, or t
  misc_feature (475)..(475): n is a, c, g, or t
  misc_feature (486)..(486): n is a, c, g, or t
  misc_feature (494)..(494): n is a, c, g, or t
  misc_feature (509)..(509): n is a, c, g, or t
  misc_feature (553)..(553): n is a, c, g, or t
  misc_feature (556)..(556): n is a, c, g, or t

SEQ ID NO: 214839 - DNA, 468 bp, Canis familiaris; identical to SEQ ID NO: 4732
  misc_feature (156)..(156): n is a, c, g, or t
  misc_feature (406)..(406): n is a, c, g, or t
  misc_feature (423)..(423): n is a, c, g, or t
  misc_feature (441)..(441): n is a, c, g, or t
  misc_feature (456)..(456): n is a, c, g, or t

SEQ ID NO: 214840 - DNA, 600 bp, Canis familiaris
  misc_feature (361)..(361): n is a, c, g, or t
  misc_feature (366)..(366): n is a, c, g, or t
  misc_feature (397)..(397): n is a, c, g, or t
  misc_feature (482)..(482): n is a, c, g, or t
  misc_feature (498)..(498): n is a, c, g, or t
  misc_feature (518)..(518): n is a, c, g, or t
  misc_feature (533)..(533): n is a, c, g, or t
  misc_feature (551)..(551): n is a, c, g, or t
  misc_feature (567)..(567): n is a, c, g, or t
  misc_feature (578)..(578): n is a, c, g, or t
tacgatgtgatcgtgctggggaccggcctcaccgaatgtatcttgtcgggcatcatgtccgtgaacggcaagaaagtgctgcatatggaccggaacccctactatgggggtgagaagctcctccatcacacccctggaagagctctataagcgttttcaattgctggaggggccccctgaggcaatgggcaggggccgagactggaacgttgacctgatcccgaagttcctcatggccaatgggcagctggtaaagatgctgctgtatacaaaggtgacgcgctacctggacttcaaggtggtggagggcaagcttcgtctacaaagggggaaagatctataaaatgccattcactgagancgaanctttgctttcaatttgatgggattgtttganaaaaaccgtttcccaagtttctggtatttttggcaaacttttatgaaaatgaccccaaaccttcagggtgttgaccccaaaacancaacatgcgtgacgtntaccggaagtttgacttggncaggatgtaattgantttactggcatgcctggnctttaccgactgatantacttgacaancttttttaaacataaccgataa

SEQ ID NO: 214841 - DNA, 459 bp, Canis familiaris; identical to SEQ ID NO: 4734
  misc_feature (195)..(195): n is a, c, g, or t
  misc_feature (281)..(281): n is a, c, g, or t
  misc_feature (389)..(389): n is a, c, g, or t
  misc_feature (394)..(394): n is a, c, g, or t
  misc_feature (407)..(407): n is a, c, g, or t
  misc_feature (415)..(415): n is a, c, g, or t
  misc_feature (429)..(429): n is a, c, g, or t
  misc_feature (437)..(437): n is a, c, g, or t
  misc_feature (447)..(447): n is a, c, g, or t

SEQ ID NO: 214842 - DNA, 585 bp, Canis familiaris; identical to SEQ ID NO: 4735
  misc_feature (411)..(411): n is a, c, g, or t
  misc_feature (514)..(514): n is a, c, g, or t
  misc_feature (517)..(517): n is a, c, g, or t
  misc_feature (527)..(527): n is a, c, g, or t
  misc_feature (543)..(543): n is a, c, g, or t
  misc_feature (552)..(552): n is a, c, g, or t
  misc_feature (566)..(566): n is a, c, g, or t
  misc_feature (570)..(570): n is a, c, g, or t

SEQ ID NO: 214843 - DNA, 447 bp, Canis familiaris; identical to SEQ ID NO: 4736

SEQ ID NO: 214844 - DNA, 600 bp, Canis familiaris
  misc_feature (140)..(140): n is a, c, g, or t
  misc_feature (275)..(275): n is a, c, g, or t
  misc_feature (277)..(277): n is a, c, g, or t
  misc_feature (306)..(306): n is a, c, g, or t
  misc_feature (333)..(333): n is a, c, g, or t
  misc_feature (396)..(396): n is a, c, g, or t
  misc_feature (418)..(418): n is a, c, g, or t
  misc_feature (438)..(438): n is a, c, g, or t
  misc_feature (506)..(506): n is a, c, g, or t
  misc_feature (525)..(525): n is a, c, g, or t
  misc_feature (563)..(563): n is a, c, g, or t
  misc_feature (565)..(565): n is a, c, g, or t
  misc_feature (595)..(595): n is a, c, g, or t
cggactacctcaacctggtgcagtgcgagacactcgaggacctgaagctgcacctgcagagcacagactacggcaacttcctggccaatgaggcatcgccgttgaccgtgtcagttattgatgaccggcttaaggagaanatggtggtggagttccgccacatgaggaaccatgcctatgagccactcgccagcttcctggacttcattacttacagctacatgatcgacaatgtcatcctgctcatcacgggcacgctgcaccagcgctctatngncgagcttgtgcccaagtgccacccactangcaacttttgagcagatggaagctgtnaacaattggccaaaaacctgccgagctctacaatggcaattttggtggacaacgcccctgggnggccttttttcaggaattggantttaaaacaaggacctttgntgagatgaacaatcgagatcatttgcacaacactttaaaaaggcctaccttgggagtctttttacaantttttgaacctaattgggngggaccacggccgatgccatgtgccccatctggagggngngctgggcaaccttacactgcccggccttgnagccc

SEQ ID NO: 214845 - DNA, 600 bp, Canis familiaris
  misc_feature (115)..(115): n is a, c, g, or t
  misc_feature (255)..(255): n is a, c, g, or t
  misc_feature (402)..(402): n is a, c, g, or t
  misc_feature (466)..(466): n is a, c, g, or t
  misc_feature (483)..(483): n is a, c, g, or t
  misc_feature (504)..(504): n is a, c, g, or t
  misc_feature (506)..(506): n is a, c, g, or t
  misc_feature (532)..(532): n is a, c, g, or t
  misc_feature (574)..(574): n is a, c, g, or t
  misc_feature (583)..(583): n is a, c, g, or t
ctacttaaaacattggcaaaaaaaaaaaatcaagatttaaatttgtatttgtactgaaaaagtaatcataactagtaaatctcagccaccttacacttgaaagaagagttgttgntatttcttaaatgttagcagactttcccgtctgtcaggaaaatcatatttatgaatcccgtcggtattgctttgtaactgaaaaaacatcaaatagtactcagacttgaattctttctaaatttgaaaaataaagtaatnaattgtatcacgctaaggacaagatgcagattctggggaaaaaatgtttttcttcatttcaaaatattctttactaataatggctttgagcaaagaagctcaatttttaggtgactgaaattagagagggtattggctgtagagtcnttttttgtgagccaaccttaaaatcaatttatttgaaatagcaaaacccggttagttttaattntccgcttctggtaatantaaaatttttggcttggttancncaattggaacaagtaaaaaaagttgnatgctggcatgcttcaatacccatgaatagcctatgaatacntgtcccaantggaggggcatggatgc

SEQ ID NO: 214846 - DNA, 493 bp, Canis familiaris; identical to SEQ ID NO: 4739
  misc_feature (68)..(68): n is a, c, g, or t
  misc_feature (149)..(149): n is a, c, g, or t
  misc_feature (216)..(216): n is a, c, g, or t
  misc_feature (289)..(289): n is a, c, g, or t
  misc_feature (302)..(302): n is a, c, g, or t
  misc_feature (318)..(318): n is a, c, g, or t
  misc_feature (431)..(431): n is a, c, g, or t
  misc_feature (452)..(452): n is a, c, g, or t
  misc_feature (463)..(463): n is a, c, g, or t
  misc_feature (480)..(480): n is a, c, g, or t

SEQ ID NO: 214847 - DNA, 317 bp, Canis familiaris; identical to SEQ ID NO: 4740

SEQ ID NO: 214848 - DNA, 425 bp, Canis familiaris; identical to SEQ ID NO: 4741
  misc_feature (95)..(95): n is a, c, g, or t
  misc_feature (223)..(223): n is a, c, g, or t
  misc_feature (270)..(270): n is a, c, g, or t
  misc_feature (287)..(287): n is a, c, g, or t
  misc_feature (332)..(332): n is a, c, g, or t
  misc_feature (358)..(358): n is a, c, g, or t
  misc_feature (390)..(390): n is a, c, g, or t

SEQ ID NO: 214849 - DNA, 535 bp, Canis familiaris; identical to SEQ ID NO: 4742
  misc_feature (311)..(311): n is a, c, g, or t
  misc_feature (425)..(425): n is a, c, g, or t
  misc_feature (451)..(451): n is a, c, g, or t
  misc_feature (466)..(466): n is a, c, g, or t
  misc_feature (496)..(496): n is a, c, g, or t
  misc_feature (504)..(504): n is a, c, g, or t
  misc_feature (506)..(506): n is a, c, g, or t

SEQ ID NO: 214850 - DNA, 443 bp, Canis familiaris; identical to SEQ ID NO: 4743
  misc_feature (422)..(422): n is a, c, g, or t

SEQ ID NO: 214851 - DNA, 188 bp, Canis familiaris; identical to SEQ ID NO: 4744

SEQ ID NO: 214852 - DNA, 416 bp, Canis familiaris; identical to SEQ ID NO: 4745
  misc_feature (300)..(300): n is a, c, g, or t
  misc_feature (369)..(369): n is a, c, g, or t

SEQ ID NO: 214853 - DNA, 584 bp, Canis familiaris; identical to SEQ ID NO: 4746
  misc_feature (237)..(237): n is a, c, g, or t
  misc_feature (419)..(419): n is a, c, g, or t
  misc_feature (447)..(447): n is a, c, g, or t
  misc_feature (457)..(457): n is a, c, g, or t
  misc_feature (472)..(472): n is a, c, g, or t
  misc_feature (494)..(494): n is a, c, g, or t
  misc_feature (525)..(525): n is a, c, g, or t
  misc_feature (571)..(571): n is a, c, g, or t

SEQ ID NO: 214854 - DNA, 600 bp, Canis familiaris
  misc_feature (407)..(407): n is a, c, g, or t
  misc_feature (443)..(443): n is a, c, g, or t
  misc_feature (481)..(481): n is a, c, g, or t
  misc_feature (513)..(513): n is a, c, g, or t
  misc_feature (557)..(557): n is a, c, g, or t
  misc_feature (577)..(577): n is a, c, g, or t
tgagagttccccaacagagagctggccgacccgctaccctcacaggactgggctgcaaaacagcatcgtcagcaccatgctatcacagctgaagaccaagggaatctgtgactcttctactccaaatggaattattgtcctcaaaagagagaaacctagacacggctatgaaaaagaaggtaatccacagaacaatctgcggaaagaagctacagtccttggaattatccagatcctgtgttgcctgttgatttcaagtttgggggccattttggtttctggtccctactcttcccacgtcaagccaacaatttccaccattttgatgtctgggtacccatttgtaggagctctatgttttgccattacgggatccctctgcattatttctgggaaaaagtcaactnaaccctttgccattgacaagctgactcaaacgtggngaggtctttcgccgctggagtaggcctttcgtccttgntgatgggctggtaaccctggggactgtttttnacgctgggcttaaaaagggaaattatcctcctgccttttcatgnctttccccgattttgaattnaggaaggttctggttacgtaatt

SEQ ID NO: 214855 - DNA, 438 bp, Canis familiaris; identical to SEQ ID NO: 4748
  misc_feature (185)..(185): n is a, c, g, or t
  misc_feature (212)..(212): n is a, c, g, or t
  misc_feature (215)..(215): n is a, c, g, or t
  misc_feature (230)..(230): n is a, c, g, or t
  misc_feature (268)..(268): n is a, c, g, or t
  misc_feature (270)..(270): n is a, c, g, or t
  misc_feature (278)..(278): n is a, c, g, or t
  misc_feature (327)..(327): n is a, c, g, or t
  misc_feature (388)..(388): n is a, c, g, or t
  misc_feature (399)..(399): n is a, c, g, or t
  misc_feature (402)..(402): n is a, c, g, or t
  misc_feature (419)..(419): n is a, c, g, or t

SEQ ID NO: 214856 - DNA, 485 bp, Canis familiaris; identical to SEQ ID NO: 4749
  misc_feature (382)..(382): n is a, c, g, or t
  misc_feature (411)..(411): n is a, c, g, or t
  misc_feature (415)..(415): n is a, c, g, or t
  misc_feature (443)..(443): n is a, c, g, or t
  misc_feature (446)..(446): n is a, c, g, or t
  misc_feature (460)..(460): n is a, c, g, or t

SEQ ID NO: 214857 - DNA, 600 bp, Canis familiaris
  misc_feature (347)..(347): n is a, c, g, or t
  misc_feature (368)..(368): n is a, c, g, or t
  misc_feature (370)..(370): n is a, c, g, or t
  misc_feature (385)..(385): n is a, c, g, or t
  misc_feature (422)..(422): n is a, c, g, or t
  misc_feature (427)..(427): n is a, c, g, or t
  misc_feature (467)..(467): n is a, c, g, or t
  misc_feature (495)..(495): n is a, c, g, or t
  misc_feature (500)..(500): n is a, c, g, or t
  misc_feature (502)..(502): n is a, c, g, or t
  misc_feature (528)..(528): n is a, c, g, or t
  misc_feature (533)..(533): n is a, c, g, or t
  misc_feature (548)..(548): n is a, c, g, or t
  misc_feature (558)..(558): n is a, c, g, or t
agtccttcatttatttacgtggtctggagccctcaaaatgatctattattaaggttcagggcagatctgtgccataacagttcccctttgtcctgttgttctccccctccccacagacaggaggactcctaccctgctttttttgcagtaattggctgcatgcccacagcctggtctgaaagtctcctctctccctttcagatgacccagcagatggctgggatgaacttctgtggagcccatggcatgctgagctatggacagtcgatgaacggcggaaatggacaggcagcgaatcagactctcagccctcagatgtggaaataaaaacaaaacacctgtatggnttccactcacctcagcccctntnttccaattttcctcnttcccaactttcccatccattccctttcctacctttntgttnggttaagaaatggtcaattgttgcctggggtttgggattntgccaacccaccactttctggacaccanacctntntgtggtctatgtggacatgtccctanccatnccgacttttttgagnctaaacccantcctttctggaccacaccttaggaattgtgggcaaaggactt

SEQ ID NO: 214858 - DNA, 406 bp, Canis familiaris; identical to SEQ ID NO: 4751

SEQ ID NO: 214859 - DNA, 516 bp, Canis familiaris; identical to SEQ ID NO: 4752
  misc_feature (398)..(398): n is a, c, g, or t
  misc_feature (416)..(416): n is a, c, g, or t
  misc_feature (481)..(481): n is a, c, g, or t

SEQ ID NO: 214860 - DNA, 392 bp, Canis familiaris; identical to SEQ ID NO: 4753
  misc_feature (6)..(6): n is a, c, g, or t
  misc_feature (17)..(17): n is a, c, g, or t
  misc_feature (35)..(35): n is a, c, g, or t
  misc_feature (42)..(42): n is a, c, g, or t
  misc_feature (58)..(58): n is a, c, g, or t
  misc_feature (82)..(82): n is a, c, g, or t
  misc_feature (87)..(87): n is a, c, g, or t
  misc_feature (277)..(277): n is a, c, g, or t
  misc_feature (331)..(331): n is a, c, g, or t
  misc_feature (339)..(339): n is a, c, g, or t

SEQ ID NO: 214861 - DNA, 600 bp, Canis familiaris
  misc_feature (90)..(90): n is a, c, g, or t
  misc_feature (110)..(110): n is a, c, g, or t
  misc_feature (127)..(127): n is a, c, g, or t
  misc_feature (139)..(139): n is a, c, g, or t
  misc_feature (300)..(300): n is a, c, g, or t
  misc_feature (319)..(319): n is a, c, g, or t
  misc_feature (408)..(408): n is a, c, g, or t
  misc_feature (420)..(420): n is a, c, g, or t
  misc_feature (440)..(440): n is a, c, g, or t
  misc_feature (445)..(445): n is a, c, g, or t
  misc_feature (463)..(463): n is a, c, g, or t
  misc_feature (475)..(475): n is a, c, g, or t
  misc_feature (488)..(488): n is a, c, g, or t
  misc_feature (539)..(539): n is a, c, g, or t
  misc_feature (544)..(544): n is a, c, g, or t
  misc_feature (575)..(575): n is a, c, g, or t
  misc_feature (589)..(589): n is a, c, g, or t
ttattacccttggtaggcattagacttgcacttttttttttttttttttttttttttaagggttctgcatcgtggaagcatttgacccanaatggaaagcagggcatggnagctagcctatgatggnggattccttcanatgttttctttccttctttgagtatgggtgctttttccatctgctaccttttgttctctggttcaaatcattacagagtaaagggtctttgagttggtcggttccaaaagatggcctttatactcaatccacacacattggtcttctagccatgctgagcngaaaacaaaaaccgaaacngaaaaaccaagatgaagtgcccagtggcagccaaaaaacaaaacccctcaaaacccgcaaaagtaaaacaattgcaacgtgcattgtantaaaaaaaaggntttccattcggcaattggtnaattnatatggtatggttttaancactggttggtncctccctccattnttggcttcatgcagcaactcaaaaaatttaaaatgaagttacattgggttnttttnaacctttgcttgtaagtttaaaaaaattggncttgtgccaaattnaaaatttgttg

SEQ ID NO: 214862 - DNA, 537 bp, Canis familiaris; identical to SEQ ID NO: 4755
  misc_feature (419)..(419): n is a, c, g, or t
  misc_feature (445)..(445): n is a, c, g, or t
  misc_feature (470)..(470): n is a, c, g, or t
  misc_feature (487)..(487): n is a, c, g, or t
  misc_feature (497)..(497): n is a, c, g, or t
  misc_feature (518)..(518): n is a, c, g, or t
  misc_feature (520)..(520): n is a, c, g, or t
  misc_feature (532)..(532): n is a, c, g, or t

SEQ ID NO: 214863 - DNA, 600 bp, Canis familiaris
  misc_feature (320)..(320): n is a, c, g, or t
  misc_feature (344)..(344): n is a, c, g, or t
  misc_feature (364)..(364): n is a, c, g, or t
  misc_feature (391)..(391): n is a, c, g, or t
  misc_feature (403)..(403): n is a, c, g, or t
  misc_feature (461)..(461): n is a, c, g, or t
  misc_feature (489)..(489): n is a, c, g, or t
  misc_feature (498)..(498): n is a, c, g, or t
  misc_feature (524)..(524): n is a, c, g, or t
  misc_feature (556)..(556): n is a, c, g, or t
  misc_feature (562)..(562): n is a, c, g, or t
  misc_feature (564)..(564): n is a, c, g, or t
  misc_feature (586)..(587): n is a, c, g, or t
ccgccttactgtttctagtcttcgggagtcagggctaaaggtcaaccagccagcctcttttgcagtcagcctgaacggggccaagggggcgatcgatgctaaggtgcacagcccctcgggagccctggaggagtgctatgtcacagagatcgaccaagataagtatgccgtacgcttcatcccgcgggagaacggggtctacctaattgatgtcaagttcaatggcacccacattcctggaagccccttcaagatccgagttggggagcctgggcacggaggggacccaggcctggtgtctgcctatggagccggcctanaaggtggtgtcacagggagcccanctgagtttatcgtgaacacnaacaacgcgggagctggtgccctgtcngtgacatcgatngggccttcaaagtgaaaatggattgcaagaatgccccagggctaccgtgtaactacantccatggacctggagtacctatttcatnaattggggncctacaatcggggcagccttaaggcnaatacagtccctttgtaaaacacacttcatanaatatngngttgggatcttacaaaatgcanngccccaaagggct

SEQ ID NO: 214864 - DNA, 426 bp, Canis familiaris; identical to SEQ ID NO: 4757
  misc_feature (331)..(331): n is a, c, g, or t
  misc_feature (399)..(399): n is a, c, g, or t

SEQ ID NO: 214865 - DNA, 457 bp, Canis familiaris; identical to SEQ ID NO: 4758
  misc_feature (381)..(381): n is a, c, g, or t
  misc_feature (441)..(441): n is a, c, g, or t

SEQ ID NO: 214866 - DNA, 600 bp, Canis familiaris
  misc_feature (390)..(390): n is a, c, g, or t
  misc_feature (407)..(407): n is a, c, g, or t
  misc_feature (460)..(460): n is a, c, g, or t
  misc_feature (462)..(462): n is a, c, g, or t
  misc_feature (553)..(553): n is a, c, g, or t
  misc_feature (555)..(555): n is a, c, g, or t
  misc_feature (557)..(557): n is a, c, g, or t
  misc_feature (579)..(579): n is a, c, g, or t
  misc_feature (587)..(587): n is a, c, g, or t
tcactgggttagaatttaaaaccattatttattattcaaattgccccagcaacaggcactttgctagttctttcaagttcgttcctgtgtccttaggactcatctgcatcccttttttttaaagcactttatcactttctgacactatagaacactccaggcacatcttgttattttccctgcctaagcctttgaattagccatttctcctagaaaccctgtttcctttagtggagaatggtatttagaaaccaacatctggggagtacctgggtggatcagttggttaagagtccaactcttgatttcagctcaggtcgtgatctcagggtcatgagatcaggccctgtgctgggctctgcactcagtgtaaaagtctgcttcttcctnttcctgatctttttttnttcaaataatacaatcttaaaaaaaggaaaaaagaaaaaaaaatcacatctangnactgaagctatgatctaggtatactgctttgggtctttaaaggacagactatgatatatatgttgttagcaaccatgtttcacatagattntntnaaaaagcatgagttcacctatntttcactntgatccacacaaa

SEQ ID NO: 214867 - DNA, 318 bp, Canis familiaris; identical to SEQ ID NO: 4760

SEQ ID NO: 214868 - DNA, 600 bp, Canis familiaris
  misc_feature (70)..(70): n is a, c, g, or t
  misc_feature (374)..(374): n is a, c, g, or t
  misc_feature (382)..(382): n is a, c, g, or t
  misc_feature (412)..(412): n is a, c, g, or t
  misc_feature (428)..(428): n is a, c, g, or t
  misc_feature (482)..(482): n is a, c, g, or t
  misc_feature (486)..(486): n is a, c, g, or t
  misc_feature (502)..(502): n is a, c, g, or t
  misc_feature (521)..(521): n is a, c, g, or t
  misc_feature (526)..(526): n is a, c, g, or t
  misc_feature (535)..(535): n is a, c, g, or t
  misc_feature (565)..(565): n is a, c, g, or t
gaatataattactgtgaaagtctaaaagctgtgttctagaattctccgcctcacagcagataaataaggnagtgaattaattattcattccattccactatcatgaaggactccggatagacttggccagccgatgtttacaaacagaattttgtattttaattttacagattttcctacatgatttttctaaattactaggtcaggttgtaaaagtcagtgcaataacaaagattcctttttaagagaaaattgtttctatcactttcccataagctgtgtgaagaatcatggacagaacttacactacttttaccatgtttcatcttggcataacatggttattttttaaatagaaattttcattttttgtnaatttttnaaagaatatttcaattggagcgcatctggnggttcctaatctgggnaatttttggaggcaggctggcaacatttcccaaattgaccaaccattatacccntttntgatagtttatttaancatagggggattggccaanttttnaaaacctgngggtttccaacttttttgccaccttgactntgaaatccatgctgctttggggcatatactgacct

SEQ ID NO: 214869 - DNA, 463 bp, Canis familiaris; identical to SEQ ID NO: 4762
  misc_feature (209)..(209): n is a, c, g, or t
  misc_feature (212)..(212): n is a, c, g, or t
  misc_feature (232)..(232): n is a, c, g, or t
  misc_feature (262)..(262): n is a, c, g, or t
  misc_feature (289)..(289): n is a, c, g, or t
  misc_feature (341)..(341): n is a, c, g, or t
  misc_feature (351)..(351): n is a, c, g, or t
  misc_feature (365)..(365): n is a, c, g, or t
  misc_feature (377)..(377): n is a, c, g, or t
  misc_feature (394)..(394): n is a, c, g, or t
  misc_feature (416)..(416): n is a, c, g, or t
  misc_feature (419)..(419): n is a, c, g, or t
  misc_feature (451)..(451): n is a, c, g, or t

SEQ ID NO: 214870 - DNA, 600 bp, Canis familiaris
  misc_feature (278)..(278): n is a, c, g, or t
  misc_feature (337)..(337): n is a, c, g, or t
  misc_feature (353)..(353): n is a, c, g, or t
  misc_feature (373)..(373): n is a, c, g, or t
  misc_feature (375)..(375): n is a, c, g, or t
  misc_feature (400)..(400): n is a, c, g, or t
  misc_feature (404)..(404): n is a, c, g, or t
  misc_feature (414)..(414): n is a, c, g, or t
  misc_feature (432)..(432): n is a, c, g, or t
  misc_feature (508)..(508): n is a, c, g, or t
  misc_feature (523)..(523): n is a, c, g, or t
  misc_feature (532)..(532): n is a, c, g, or t
tcacccgcatcctcgaatcttccccaggtgtgacagaggtgactatcatagaaaaaccacctgctgaacgtcatatgatttcttcatgggaacaaaaaaataactgcatgctacctgaggatgtgaagaatttttacctgatgaccaatggcttccacatgacatggagtgtgaagctggatggtgagtcaaccttcttgctgtaagagcacaccattccattgggcaagcatggcaattaacagcatctcaaaactgactcaactcaaccagtcttncgtgtactcactccctaatgcaccaactctggcagacctggaggatgatacacttgaangcttcatagcatcttnaccaggaagtagaagctttntnaagaaactactttttttattattcncaanaagaagtttnattcatttaagttttatnaggaaatggccgcaattcaatcacatcttcagctctcttttaatttagtctttactatttcacccatttgaactgntttttcactgaaatntggactctnaagcatgatgaggtggaataactttttcaaacttgtaaggtggtaaatattacctgacctgaagttta

SEQ ID NO: 214871 - DNA, 390 bp, Canis familiaris; identical to SEQ ID NO: 4764
  misc_feature (1)..(1): n is a, c, g, or t
  misc_feature (69)..(69): n is a, c, g, or t
  misc_feature (93)..(93): n is a, c, g, or t
  misc_feature (107)..(107): n is a, c, g, or t
  misc_feature (135)..(135): n is a, c, g, or t
  misc_feature (184)..(184): n is a, c, g, or t
  misc_feature (188)..(188): n is a, c, g, or t
  misc_feature (227)..(227): n is a, c, g, or t
  misc_feature (254)..(254): n is a, c, g, or t
  misc_feature (362)..(362): n is a, c, g, or t
  misc_feature (378)..(378): n is a, c, g, or t
  misc_feature (384)..(384): n is a, c, g, or t

SEQ ID NO: 214872 - DNA, 550 bp, Canis familiaris; identical to SEQ ID NO: 4765
  misc_feature (410)..(410): n is a, c, g, or t
  misc_feature (427)..(427): n is a, c, g, or t
  misc_feature (457)..(457): n is a, c, g, or t
  misc_feature (465)..(465): n is a, c, g, or t
  misc_feature (475)..(475): n is a, c, g, or t

SEQ ID NO: 214873 - DNA, 552 bp, Canis familiaris; identical to SEQ ID NO: 4766
  misc_feature (352)..(352): n is a, c, g, or t
  misc_feature (380)..(380): n is a, c, g, or t
  misc_feature (404)..(404): n is a, c, g, or t
  misc_feature (426)..(426): n is a, c, g, or t
  misc_feature (438)..(438): n is a, c, g, or t
  misc_feature (443)..(443): n is a, c, g, or t
  misc_feature (470)..(470): n is a, c, g, or t
  misc_feature (489)..(489): n is a, c, g, or t
  misc_feature (513)..(514): n is a, c, g, or t

SEQ ID NO: 214874 - DNA, 440 bp, Canis familiaris; identical to SEQ ID NO: 4767
  misc_feature (371)..(371): n is a, c, g, or t
  misc_feature (385)..(385): n is a, c, g, or t
  misc_feature (391)..(391): n is a, c, g, or t

SEQ ID NO: 214875 - DNA, 401 bp, Canis familiaris; identical to SEQ ID NO: 4768
  misc_feature (323)..(323): n is a, c, g, or t

SEQ ID NO: 214876 - DNA, 464 bp, Canis familiaris; identical to SEQ ID NO: 4769
  misc_feature (406)..(406): n is a, c, g, or t

SEQ ID NO: 214877 - DNA, 438 bp, Canis familiaris; identical to SEQ ID NO: 4770
  misc_feature (191)..(191): n is a, c, g, or t

SEQ ID NO: 214878 - DNA, 555 bp, Canis familiaris; identical to SEQ ID NO: 4771
  misc_feature (456)..(456): n is a, c, g, or t
  misc_feature (476)..(476): n is a, c, g, or t
  misc_feature (531)..(531): n is a, c, g, or t
  misc_feature (542)..(542): n is a, c, g, or t

SEQ ID NO: 214879 - DNA, 600 bp, Canis familiaris
  misc_feature (370)..(370): n is a, c, g, or t
  misc_feature (393)..(393): n is a, c, g, or t
  misc_feature (398)..(398): n is a, c, g, or t
  misc_feature (491)..(491): n is a, c, g, or t
  misc_feature (550)..(551): n is a, c, g, or t
cgactggcgctgtgctcagtctatgcacgagttctcggccaaggacatcgatggacgcgaggtgaacctggacaagtaccggggcttcgtgtgcatcgtcaccaacgtggcctcgcaatgaggcaagacggacgtaaactacactcagcttgtcgacctgcacgcccgatatgctgagtccggtttacgcatcctggccttcccctgcaaccagttcgggaggcaggagccagggagcaatgcggagatcaaagagttcgccgccggctataatgtcaagttcgatatgtacagcaagatctgcgtgaacggagacgatgctcacccgctgtggaagtggatgaaaatccagcccaaggggaggggcatnctgggaaatgccatcaaagtggnacttnaccaaagttcttaattgccaagaatggttggtggtgaaacggtatggtccattggaagacccctgtaatagagaaggacttgccttgttcctntagttcacaagtatgcgccttccacggccctgcccttggagccttcaccggaccaatgnnagttgtttaaaacaacccgttgtgggcagaccgggaaccgggtcaacct

SEQ ID NO: 214880 - DNA, 576 bp, Canis familiaris; identical to SEQ ID NO: 4773
  misc_feature (440)..(440): n is a, c, g, or t
  misc_feature (443)..(443): n is a, c, g, or t
  misc_feature (450)..(450): n is a, c, g, or t
  misc_feature (540)..(540): n is a, c, g, or t
  misc_feature (551)..(551): n is a, c, g, or t
  misc_feature (558)..(558): n is a, c, g, or t

SEQ ID NO: 214881 - DNA, 600 bp, Canis familiaris
  misc_feature (397)..(397): n is a, c, g, or t
  misc_feature (423)..(423): n is a, c, g, or t
  misc_feature (508)..(508): n is a, c, g, or t
  misc_feature (556)..(556): n is a, c, g, or t
  misc_feature (570)..(570): n is a, c, g, or t
  misc_feature (575)..(575): n is a, c, g, or t
acccaagaaggacattatcaagtttctacaggaccacggttcagattcgtttcttgcagaacataagttattaggaaacattaaaaatgtggccaagacagctaacaaggaccatttggttacagcctacaaccatctttttgaaagtaagcgtttcaaaggtactgaaagtataagtaaagtgtctgagcaggtgaaaaatgtgaagcttaatgaagataaacccaaagaaaccaagtgtgaagagactctggatgagggtccaccaaaatatacaaaatctgtccttaaaaaaggagataaaaccaactttcccaaaaagggagatgttgttcactgctggtatacaggaacactacaggatgggactggttttgatactaatattcaaaccagntcaaaagaagaagaaaaatggccagnctttaagttttaaggttggaatagggcaaagtttccgaggttgggatgaagccctcttactttgagtaaaggagaaaaggttcgntagagattgacccaaatgggcttttggaagaaggacagccttgtgccnaattccccaaagcnaaatnatttttaagggaaataggggaattg

SEQ ID NO: 214882 - DNA, 600 bp, Canis familiaris
  misc_feature (354)..(354): n is a, c, g, or t
  misc_feature (380)..(380): n is a, c, g, or t
  misc_feature (436)..(436): n is a, c, g, or t
  misc_feature (448)..(448): n is a, c, g, or t
  misc_feature (451)..(451): n is a, c, g, or t
  misc_feature (497)..(497): n is a, c, g, or t
  misc_feature (520)..(520): n is a, c, g, or t
  misc_feature (549)..(549): n is a, c, g, or t
  misc_feature (560)..(560): n is a, c, g, or t
  misc_feature (570)..(570): n is a, c, g, or t
  misc_feature (594)..(594): n is a, c, g, or t
agcttataaattcttccctcatggatcatgcctttggtgttgtatttttaaattcattgccatacccaaggtcatccaggttttctcatatattatcttaaaggagttttatagttttgcattttacatctaaataattttgggttaatttttgtgaagagtttaaggtctgtgtccagattttggggggaggggagtttatatgactgtatatagtttctccagaacaaaccgtttgttgaaaagactatattttcatctctgtattgcatttgcacttttgtcaaagatcaactgactacacttacagggttctatttctgggctttctgttctgctccattatctacttgnctattctttcaccaatatcacactgngctgatcactgtactttacagtaagccttgaggttggataggtggcagtccttaancatggaatctgnaanatcaattggggaagacccgacatatgaagtcttgccaaaatgagtntttctattatgacatggaaaacnctccattactaagtcattggtacttcatnaagtttggganttctaataanctggccaatttgtcgataacctanatatgg

SEQ ID NO: 214883 - DNA, 462 bp, Canis familiaris; identical to SEQ ID NO: 4776
  misc_feature (260)..(260): n is a, c, g, or t
  misc_feature (324)..(324): n is a, c, g, or t
  misc_feature (375)..(375): n is a, c, g, or t

SEQ ID NO: 214884 - DNA, 600 bp, Canis familiaris
  misc_feature (346)..(346): n is a, c, g, or t
  misc_feature (369)..(369): n is a, c, g, or t
  misc_feature (412)..(412): n is a, c, g, or t
  misc_feature (461)..(461): n is a, c, g, or t
  misc_feature (471)..(471): n is a, c, g, or t
  misc_feature (481)..(481): n is a, c, g, or t
  misc_feature (507)..(507): n is a, c, g, or t
  misc_feature (515)..(515): n is a, c, g, or t
  misc_feature (524)..(524): n is a, c, g, or t
  misc_feature (536)..(536): n is a, c, g, or t
  misc_feature (557)..(557): n is a, c, g, or t
  misc_feature (560)..(560): n is a, c, g, or t
tcagttggtacctacaggtccctctatcagggactctgtgataactacaatagcaggaggaaaagcctcctaactttcagtgaggaggtctacttgccttgggtataaaacagaaatgaaagtggataaagggttgtctcagactaaaactgatgtcttctgagctttcttccattttgctcttagacacaggcaaagtgcttccctagtgtctctgcatgtgaacatataaatgatcttttttctacatttactttaaaggtccattgttgacacattgcttatcggaaccacattttggtcacatatcattttgaaaggcagatatgaatgctgtattaagtangagaaacttcttcagtggaccangatgaagtatctctttagtcaattcaaaaacaaaatggtaggngttatttccagctttaggagaacaaggttggttatgagtaatctatttncatatatcanccttagaaanggaattatctgttgggttttttgggngggaaggngggcagcantaaattgtttcnaaagctggaaaaaaaatgtcnggngaattaatcctgggcttcattgggggttttaatgggggac

SEQ ID NO: 214885 - DNA, 280 bp, Canis familiaris; identical to SEQ ID NO: 4778
  misc_feature (209)..(209): n is a, c, g, or t

SEQ ID NO: 214886 - DNA, 600 bp, Canis familiaris
  misc_feature (115)..(115): n is a, c, g, or t
  misc_feature (223)..(223): n is a, c, g, or t
  misc_feature (358)..(358): n is a, c, g, or t
  misc_feature (370)..(371): n is a, c, g, or t
  misc_feature (423)..(423): n is a, c, g, or t
  misc_feature (444)..(445): n is a, c, g, or t
  misc_feature (468)..(468): n is a, c, g, or t
  misc_feature (499)..(499): n is a, c, g, or t
  misc_feature (503)..(503): n is a, c, g, or t
  misc_feature (520)..(520): n is a, c, g, or t
  misc_feature (546)..(546): n is a, c, g, or t
  misc_feature (586)..(586): n is a, c, g, or t
  misc_feature (590)..(590): n is a, c, g, or t
agctatctccaaccattttcattcacaacttaacataaactggttgaaaatggagtctgtctttgccatcttgtggcttaaagttctttgactttgtgacgcattatgatagtgntctaactttaatcttttctcttcctggtgttcctttcaccatgaattcatagcatcaagtgaaacttcccagaatgagaactgttcaggttattctgacatacacagngaagcagaatgctatcaagaagacacaaattccaaactggtcagtgggaaatgactagaaatacaggcttttaggagtttgcatcttttagctatatttgcaaatactgagatttaagcagctgagaaacagcanagttgactaaannttttatattcttggcctcacagattttttggatctttttggaatggatcaanggatgttttggttccttccgnnttattaatgaaacactttttagngttttaacataaaactacttggtttgaaatnaagnggttggaacacaaattngactttatttaagcatgttgatttgnggttcatttaaaaactttaggccaatggacagttgatttngaantagccacggc

SEQ ID NO: 214887 - DNA, 600 bp, Canis familiaris
  misc_feature (365)..(365): n is a, c, g, or t
  misc_feature (390)..(390): n is a, c, g, or t
  misc_feature (433)..(433): n is a, c, g, or t
  misc_feature (483)..(483): n is a, c, g, or t
  misc_feature (497)..(498): n is a, c, g, or t
  misc_feature (557)..(557): n is a, c, g, or t
  misc_feature (580)..(580): n is a, c, g, or t
ggttcgaggtccgccactcacctcactgccacacgttagaaatgagacaatcaaagcccaacagggtgacactcctgtccatcagctggggtggggcatccgcacacgaggctggagcagcaggcaggctaggctggggccaaaggcctcgcagccgaagctcccaaacggttctcttcacctactggggaagcttcttaacacctgacagcgccagagacgggagcatggtcaagccaaacggcggacaggagccaacctggattgggtgtttgggaagggagggcgtatatagcagagaacatatggaacaagcttcgggggcctccttgcccccctcattctttcgctctttgcattccggncatatctgtcttggcctcatgcctnccgggcacatgggcccaactttatttgctgattcataaactgntggcttgttaagttagggttagatggggagagaaaagatgcatggacaanccccaaaggcctgnntaccgatacccttgcttatggttttaggggggacctacaaacattttcaaaaaaccccncttactggtttacttataaaacntcccggcaaaaaaaaaaaat

SEQ ID NO: 214888 - DNA, 572 bp, Canis familiaris; identical to SEQ ID NO: 4781
  misc_feature (451)..(451): n is a, c, g, or t
  misc_feature (469)..(469): n is a, c, g, or t
  misc_feature (497)..(497): n is a, c, g, or t
  misc_feature (522)..(522): n is a, c, g, or t
  misc_feature (540)..(540): n is a, c, g, or t

SEQ ID NO: 214889 - DNA, 566 bp, Canis familiaris; identical to SEQ ID NO: 4782
  misc_feature (483)..(483): n is a, c, g, or t
  misc_feature (562)..(562): n is a, c, g, or t

SEQ ID NO: 214890 - DNA, 414 bp, Canis familiaris; identical to SEQ ID NO: 4783
  misc_feature (377)..(377): n is a, c, g, or t
  misc_feature (380)..(380): n is a, c, g, or t
  misc_feature (388)..(388): n is a, c, g, or t

SEQ ID NO: 214891 - DNA, 600 bp, Canis familiaris
  misc_feature (430)..(430): n is a, c, g, or t
  misc_feature (452)..(452): n is a, c, g, or t
  misc_feature (460)..(460): n is a, c, g, or t
  misc_feature (494)..(494): n is a, c, g, or t
  misc_feature (509)..(509): n is a, c, g, or t
  misc_feature (511)..(511): n is a, c, g, or t
  misc_feature (520)..(520): n is a, c, g, or t
  misc_feature (596)..(596): n is a, c, g, or t
ggtgctattgctaactgtggaataactggcaagaagaaaggcttttttttttccttttttttttcttttctttttaatggctggcttttaccggaaaagagatattttaaaaaatggcagaatttctagccttctgtatgtccaagattaggactgggttgtcaagattttcttctgttaaaggaaataaaactcgccattactgaattcagcttactattctaacttaagattcattccttaatgcttggaattttgatgtctcaaaactggaccagtggaagtgctgaatttgcattaaaaaagctaaggatacttcgcactttaaggtttaagttttactctgcttaaattaatgataagcagagcagccctgaacaatattttgtttatacaatcctgttgaagaatataatttatggttttttgnaggctggatctttcatctggtnaactgggnaaaacttttgaaaagcaatttttttaaatttggntttttaacaaaaaantncccaaaaanagatttccaagggggaaaaaatggtattatgactatgattcctggtttgcactactgtgctcaagaaaaaaacttnttaa

SEQ ID NO: 214892 - DNA, 549 bp, Canis familiaris; identical to SEQ ID NO: 4785
  misc_feature (447)..(447): n is a, c, g, or t
  misc_feature (465)..(465): n is a, c, g, or t
  misc_feature (479)..(479): n is a, c, g, or t
  misc_feature (498)..(498): n is a, c, g, or t
  misc_feature (545)..(545): n is a, c, g, or t

SEQ ID NO: 214893 - DNA, 479 bp, Canis familiaris; identical to SEQ ID NO: 4786
  misc_feature (187)..(187): n is a, c, g, or t
  misc_feature (247)..(247): n is a, c, g, or t
  misc_feature (252)..(252): n is a, c, g, or t
  misc_feature (255)..(255): n is a, c, g, or t
  misc_feature (473)..(473): n is a, c, g, or t

SEQ ID NO: 214894 - DNA, 615 bp, Canis familiaris; identical to SEQ ID NO: 4787
  misc_feature (531)..(531): n is a, c, g, or t
  misc_feature (541)..(541): n is a, c, g, or t
  misc_feature (549)..(549): n is a, c, g, or t
  misc_feature (588)..(588): n is a, c, g, or t
  misc_feature (593)..(593): n is a, c, g, or t

SEQ ID NO: 214895 - DNA, 558 bp, Canis familiaris; identical to SEQ ID NO: 4788
  misc_feature (80)..(80): n is a, c, g, or t
  misc_feature (161)..(161): n is a, c, g, or t
  misc_feature (175)..(175): n is a, c, g, or t
  misc_feature (311)..(311): n is a, c, g, or t
  misc_feature (371)..(371): n is a, c, g, or t
  misc_feature (411)..(411): n is a, c, g, or t
  misc_feature (467)..(467): n is a, c, g, or t
  misc_feature (471)..(471): n is a, c, g, or t
  misc_feature (492)..(492): n is a, c, g, or t
  misc_feature (504)..(504): n is a, c, g, or t
  misc_feature (528)..(528): n is a, c, g, or t

SEQ ID NO: 214896 - DNA, 343 bp, Canis familiaris; identical to SEQ ID NO: 4789

SEQ ID NO: 214897 - DNA, 599 bp, Canis familiaris; identical to SEQ ID NO: 4790
  misc_feature (500)..(500): n is a, c, g, or t
  misc_feature (529)..(529): n is a, c, g, or t
  misc_feature (580)..(580): n is a, c, g, or t
  misc_feature (588)..(588): n is a, c, g, or t

SEQ ID NO: 214898 - DNA, 582 bp, Canis familiaris; identical to SEQ ID NO: 4791
  misc_feature (471)..(471): n is a, c, g, or t
  misc_feature (476)..(476): n is a, c, g, or t
  misc_feature (483)..(483): n is a, c, g, or t
  misc_feature (508)..(508): n is a, c, g, or t
  misc_feature (570)..(570): n is a, c, g, or t

SEQ ID NO: 214899 - DNA, 538 bp, Canis familiaris; identical to SEQ ID NO: 4792
  misc_feature (503)..(503): n is a, c, g, or t
  misc_feature (534)..(534): n is a, c, g, or t

SEQ ID NO: 214900 - DNA, 600 bp, Canis familiaris
  misc_feature (390)..(390): n is a, c, g, or t
  misc_feature (418)..(418): n is a, c, g, or t
  misc_feature (453)..(453): n is a, c, g, or t
  misc_feature (482)..(482): n is a, c, g, or t
  misc_feature (489)..(489): n is a, c, g, or t
  misc_feature (499)..(499): n is a, c, g, or t
  misc_feature (511)..(511): n is a, c, g, or t
  misc_feature (526)..(526): n is a, c, g, or t
  misc_feature (531)..(531): n is a, c, g, or t
  misc_feature (550)..(550): n is a, c, g, or t
  misc_feature (567)..(567): n is a, c, g, or t
  misc_feature (591)..(591): n is a, c, g, or t
aggcacagcagctcgagtgggtgaagagccactaccctggcctgcatgcccggctccaggagtttgcctgccgagggcagttcgtgcctgtagggggcacctgggtggagatggacgggaaccttcccagcggagaggctatggtgagacagttcctacagggccagaacttcttcctgcaggagtttgggaaaatgtgctcggagttctggctcccagacacatttggctactcggcacagctcccccagatcatgcgcggctgcggcatcacgcgcttcctgtcccaaaaactgagctggagcttggtgaactcctttccgcaccatacttttttctgggaggggctggatggctcccgcgtgctggcccacttccacctggtgactnctatgggatgcagggcaatgtggaggangtgcttgaagaccatggtcaaaaaaccgggacaangggggcggaccaacccaaaggcctttctnttttggnttcggggacngggggcgggggnccccccaaaccatgntggancgcttgaacggttgacaanaaaacggctttcagggngagttggtttttcggacgattttncggccttga

SEQ ID NO: 214901 - DNA, 600 bp, Canis familiaris
  misc_feature (228)..(228): n is a, c, g, or t
  misc_feature (252)..(252): n is a, c, g, or t
  misc_feature (347)..(347): n is a, c, g, or t
  misc_feature (423)..(423): n is a, c, g, or t
  misc_feature (464)..(464): n is a, c, g, or t
  misc_feature (512)..(512): n is a, c, g, or t
  misc_feature (534)..(534): n is a, c, g, or t
  misc_feature (540)..(540): n is a, c, g, or t
  misc_feature (570)..(570): n is a, c, g, or t
tgctgctgcgcacccgccgctcgcagtcgtccctgctgaggtcgcctgccttgcggagcaccgccaccttcgcccaagctctccagagcgtgccagagacacaggtcagcctgctggacaacgggctgcgagtggcctccgagcagtcctcccagcctacctgcacggtcggggtgtggattgatgttggcagccgttaccgagactgagaagaacaatggggcaggntactttctggagcatctggctttnaagggaacaaagaatcgacctggcaatgccttggagaaggaggtggagagcatgggggcccatctcaatgcctatagcacccgggagcacactgnctactatatcaaggcactctccaaggacctaccaaaagctgtggagctcctggctgacattgtgcagaactgcagnctagaaaactcccagatcgagaaggagcgtgatggtgattntacaaggagcttgcaggagaacgatgcgtgcatgccgggatgtggtcnttgactacctgcatgccacaanattcanggcacacctttagccaggctttggaggggnccagggggaatgtaaggaaactatttatgc

SEQ ID NO: 214902 - DNA, 528 bp, Canis familiaris; identical to SEQ ID NO: 4795
  misc_feature (409)..(409): n is a, c, g, or t
  misc_feature (438)..(438): n is a, c, g, or t
  misc_feature (446)..(446): n is a, c, g, or t
  misc_feature (452)..(452): n is a, c, g, or t

SEQ ID NO: 214903 - DNA, 600 bp, Canis familiaris
  misc_feature (372)..(372): n is a, c, g, or t
  misc_feature (429)..(429): n is a, c, g, or t
  misc_feature (456)..(456): n is a, c, g, or t
  misc_feature (488)..(488): n is a, c, g, or t
  misc_feature (583)..(583): n is a, c, g, or t
tttggtaatggtaactgtgtgtgatgactctctttccattctactattctttcttcttgcacataatggtattattacaaatatgtaaaattagtttcccaagtattcaaaatttgttttgttttattggaggctgtggaaaggttccaaatatattttaattctaatccagacagactgcttttctatttgtatattcaaactccagagactgatgtgcctctgtggaactctttacacattcctaaaactgaggaaccgatttccacaattacaattcaaaatgctcactatgagcagccccaccaaggcccctggcagcacacacacatacctgtctagtcacaggaggtctgatctgtgcatggcagnggtattggtttcatgattatggttggtttagcctttttaatttgcttttggggaccnactataattatattaattgcttttaanaaaacttaataatgggcatttttattggctgngcataacttccttatgataaagaatgagaatatttgacctacttttaaaccttcttccttcttatcccttacattaaaaggtatatacaaagttntattaacatatacaatt

SEQ ID NO: 214904 - DNA, 600 bp, Canis familiaris
  misc_feature (441)..(441): n is a, c, g, or t
  misc_feature (528)..(528): n is a, c, g, or t
  misc_feature (531)..(531): n is a, c, g, or t
  misc_feature (539)..(539): n is a, c, g, or t
  misc_feature (591)..(591): n is a, c, g, or t
  misc_feature (597)..(597): n is a, c, g, or t
aactagtgggagaaagtcctgcagagcccagcagccagagccgcagatgacaaggcggtcactcacagccaggacctgagtctgtgttaggaaaacatattaattctcatataaacccagttcctcaccattttcctctcatctttcagtgccatttctcttcatgttaggctgtttgtacaaacttttgggagccggggtggtacatcagttctctggaatccgccaggccgctggggggtggatcaccacaccctgtagggcttctcccctcctagctgtctttgggaaacgcaggactgggaggctgttttgaccagagaggccaaggtcaagagcaaggtgtagaaaaattgtaaaatagaaaaagtgggtgttggggaattgggtttggtttgtttggtttggtttcacaattggatagctgcacaagaggctttncttcagtttcagcatggtcttccttttttcctttctacgtttttcttctattaatcaagagaaacttaaagtccatgggatggcggnttnacagctgngaactcgtcacctcaacattatgaaaagttgttttttaatctgcaactttgnccgtgnggg

SEQ ID NO: 214905 - DNA, 522 bp, Canis familiaris; identical to SEQ ID NO: 4798
  misc_feature (468)..(468): n is a, c, g, or t
  misc_feature (476)..(476): n is a, c, g, or t

SEQ ID NO: 214906 - DNA, 483 bp, Canis familiaris; identical to SEQ ID NO: 4799
  misc_feature (458)..(458): n is a, c, g, or t

SEQ ID NO: 214907 - DNA, 557 bp, Canis familiaris; identical to SEQ ID NO: 4800
  misc_feature (458)..(459): n is a, c, g, or t
  misc_feature (475)..(475): n is a, c, g, or t
  misc_feature (492)..(492): n is a, c, g, or t
  misc_feature (510)..(510): n is a, c, g, or t
  misc_feature (523)..(523): n is a, c, g, or t
  misc_feature (547)..(547): n is a, c, g, or t

SEQ ID NO: 214908 - DNA, 235 bp, Canis familiaris; identical to SEQ ID NO: 4801

SEQ ID NO: 214909 - DNA, 572 bp, Canis familiaris; identical to SEQ ID NO: 4802
  misc_feature (453)..(453): n is a, c, g, or t
  misc_feature (498)..(498): n is a, c, g, or t
  misc_feature (501)..(501): n is a, c, g, or t
  misc_feature (532)..(532): n is a, c, g, or t
  misc_feature (565)..(565): n is a, c, g, or t

SEQ ID NO: 214910 - DNA, 519 bp, Canis familiaris; identical to SEQ ID NO: 4803
  misc_feature (476)..(476): n is a, c, g, or t

SEQ ID NO: 214911 - DNA, 491 bp, Canis familiaris; identical to SEQ ID NO: 4804
  misc_feature (113)..(113): n is a, c, g, or t
  misc_feature (150)..(150): n is a, c, g, or t
  misc_feature (237)..(237): n is a, c, g, or t
  misc_feature (256)..(256): n is a, c, g, or t
  misc_feature (402)..(402): n is a, c, g, or t

SEQ ID NO: 214912 - DNA, 600 bp, Canis familiaris
  misc_feature (378)..(378): n is a, c, g, or t
  misc_feature (421)..(421): n is a, c, g, or t
  misc_feature (441)..(441): n is a, c, g, or t
  misc_feature (444)..(444): n is a, c, g, or t
  misc_feature (484)..(484): n is a, c, g, or t
  misc_feature (486)..(486): n is a, c, g, or t
  misc_feature (495)..(495): n is a, c, g, or t
  misc_feature (526)..(526): n is a, c, g, or t
  misc_feature (534)..(534): n is a, c, g, or t
  misc_feature (573)..(574): n is a, c, g, or t
taatgttgtctcaccataacacaaaaagcatgaacttgtattaatcctctataatagattgatcgtgcaccgtgtccacaggaggttggactgccaggccattttctggaatttaaggtgttgcattatttcatcaatcatttgtttacaaaaaagaaaaactaaaaaataaatttaaaatgtgaacccgtcaggtatggagtaacacctgtatcttggtatagaactgatctttttcttttgtttttgaaatactatattaatttggaatgaggtatgattctgttaaagaaaatgtatttgaagactcttcaaagcaggggctgaaacgacttcacaccattagcgggtgagacatacctctagatattttgaggnatttactatattaactacatttaaaaaggttttaaggtcgctntaaggcagaaacaatacaancantggatccaggggaatttttggggattttacttgggagggngngtataaagnaatttgaggcactggaatgacaagaaactgnttaagggngaatccaaaaattaaagcttttaaattttaagaatttgnnaaaatgtggtgggcttttttttgcca

SEQ ID NO: 214913 - DNA, 486 bp, Canis familiaris; identical to SEQ ID NO: 4806

SEQ ID NO: 214914 - DNA, 596 bp, Canis familiaris; identical to SEQ ID NO: 4807
  misc_feature (467)..(467): n is a, c, g, or t
  misc_feature (481)..(481): n is a, c, g, or t
  misc_feature (562)..(562): n is a, c, g, or t
  misc_feature (574)..(574): n is a, c, g, or t

SEQ ID NO: 214915 - DNA, 600 bp, Canis familiaris
  misc_feature (370)..(370): n is a, c, g, or t
  misc_feature (377)..(377): n is a, c, g, or t
  misc_feature (395)..(395): n is a, c, g, or t
  misc_feature (433)..(433): n is a, c, g, or t
  misc_feature (443)..(443): n is a, c, g, or t
  misc_feature (465)..(465): n is a, c, g, or t
  misc_feature (489)..(489): n is a, c, g, or t
  misc_feature (495)..(495): n is a, c, g, or t
  misc_feature (544)..(544): n is a, c, g, or t
  misc_feature (555)..(555): n is a, c, g, or t
  misc_feature (581)..(581): n is a, c, g, or t
  misc_feature (597)..(597): n is a, c, g, or t
ggtgggggtctgctacaccgaagatgaagccaaggcgctggctgaggaggtggaggttcaggacggccccaatgaggatggagagatgttcatgcggccagggaagctctccgactatttccccaaaccataccccaaccctgaggccgcccgagcagccaataacggagcactgccccctgacctcagctacatcactcgagctaggcacggtggtgaggactacgtcttctccctgctaaccggctactgtgagccacccaccggcgtgtcactgcgagaaggcctctacttcaacccctacttccctggacaggctattggcatggcgcctcccatctacgatgaagtcctggagtttgacgatggnaccccanctccatgttccaagtagncaaaggacgtgtgtacctttcttggcttgggatttgancaaaaaaacnaccatcggaaaccatggggttnaaaaagttgataataatggcttgntttttncctgactacccatgaacgggataatggtggtcttaaaaacggaagttgnattttggcacnaaagaccttgtcatggtggtaattgntgcttaggggcctgancca

SEQ ID NO: 214916 - DNA, 487 bp, Canis familiaris; identical to SEQ ID NO: 4809
  misc_feature (450)..(450): n is a, c, g, or t
  misc_feature (469)..(469): n is a, c, g, or t

SEQ ID NO: 214917 - DNA, 448 bp, Canis familiaris; identical to SEQ ID NO: 4810
  misc_feature (134)..(134): n is a, c, g, or t
  misc_feature (165)..(165): n is a, c, g, or t
  misc_feature (241)..(241): n is a, c, g, or t
  misc_feature (390)..(390): n is a, c, g, or t
  misc_feature (422)..(422): n is a, c, g, or t

SEQ ID NO: 214918 - DNA, 545 bp, Canis familiaris; identical to SEQ ID NO: 4811
  misc_feature (240)..(240): n is a, c, g, or t
  misc_feature (328)..(328): n is a, c, g, or t
  misc_feature (330)..(330): n is a, c, g, or t
  misc_feature (394)..(394): n is a, c, g, or t
  misc_feature (402)..(402): n is a, c, g, or t
  misc_feature (446)..(446): n is a, c, g, or t
  misc_feature (455)..(456): n is a, c, g, or t
  misc_feature (481)..(482): n is a, c, g, or t
  misc_feature (497)..(497): n is a, c, g, or t
  misc_feature (528)..(528): n is a, c, g, or t

SEQ ID NO: 214919 - DNA, 577 bp, Canis familiaris; identical to SEQ ID NO: 4812
  misc_feature (418)..(418): n is a, c, g, or t
  misc_feature (439)..(439): n is a, c, g, or t
  misc_feature (462)..(462): n is a, c, g, or t
  misc_feature (493)..(493): n is a, c, g, or t
  misc_feature (503)..(503): n is a, c, g, or t
  misc_feature (505)..(505): n is a, c, g, or t
  misc_feature (518)..(518): n is a, c, g, or t
  misc_feature (541)..(541): n is a, c, g, or t
  misc_feature (544)..(544): n is a, c, g, or t
  misc_feature (561)..(561): n is a, c, g, or t
  misc_feature (572)..(572): n is a, c, g, or t

SEQ ID NO: 214920 - DNA, 160 bp, Canis familiaris; identical to SEQ ID NO: 4813
  misc_feature (42)..(42): n is a, c, g, or t
  misc_feature (77)..(77): n is a, c, g, or t
  misc_feature (84)..(84): n is a, c, g, or t
  misc_feature (148)..(148): n is a, c, g, or t

SEQ ID NO: 214921 - DNA, 600 bp, Canis familiaris
  misc_feature (47)..(47): n is a, c, g, or t
  misc_feature (342)..(342): n is a, c, g, or t
  misc_feature (428)..(428): n is a, c, g, or t
  misc_feature (438)..(438): n is a, c, g, or t
  misc_feature (440)..(440): n is a, c, g, or t
  misc_feature (454)..(454): n is a, c, g, or t
  misc_feature (466)..(466): n is a, c, g, or t
  misc_feature (472)..(472): n is a, c, g, or t
  misc_feature (526)..(526): n is a, c, g, or t
  misc_feature (545)..(545): n is a, c, g, or t
  misc_feature (559)..(559): n is a, c, g, or t
  misc_feature (589)..(589): n is a, c, g, or t
  misc_feature (596)..(596): n is a, c, g, or t
cagggaccgcttacacctgagacggactacggaacagcacgtcccanaggtggaagtccaagtcaaacgtagaaggacaagcctcactgagcaaccaagagtgtcagctgtacccaaggcgatctcagcagcagcaagtccctgtggtggatttccaggcagaactgagacaggcattcttggctgagacaccaagaggtggttaaagcagtattggaacatccaggtagctaatatccaagtgaaaaaccaggctccatctactgtttgaagcttctgccccaagcttgcattgtttgtaggagaacctgcatcatacctttatcttgtagccttccttangtcttaaggatcctgaaacctaactggacattggatttggtggaacagcaccatgacttgttggaaagacaacaagatgcttgcancacattgctntngaatgagatgtatntttcaagaaggncgaatntttattggcacctttaagggtttggcaagcatataacttgatctttgcgattgngatgaattaggaagataanccaaaaatgcgaancaccaaacgtgaaaaaaacgtgtttgggtntttgttntact

SEQ ID NO: 214922 - DNA, 600 bp, Canis familiaris
  misc_feature (379)..(379): n is a, c, g, or t
  misc_feature (406)..(406): n is a, c, g, or t
  misc_feature (411)..(411): n is a, c, g, or t
  misc_feature (420)..(420): n is a, c, g, or t
  misc_feature (472)..(472): n is a, c, g, or t
  misc_feature (485)..(485): n is a, c, g, or t
  misc_feature (491)..(491): n is a, c, g, or t
  misc_feature (500)..(500): n is a, c, g, or t
  misc_feature (536)..(536): n is a, c, g, or t
  misc_feature (541)..(541): n is a, c, g, or t
  misc_feature (585)..(585): n is a, c, g, or t
tgtgctggctgtgtggggcaggcgtggggcctgctgttgcctgggacatggcttcacacagctgcagagctgtctactctattacctctgaccttggccctacctggagcccactttggcttcactgctttagacttagactctaaagtgggcccaacgtgatcctggagtcctgggatcgagtcccacatcgggctccctgcatggagcctgcttctccctctgcctgtgtctctgcccccacgcccctgtgtctttcatgaaaaaaatctttaggggcgcagctccaaggcggctccagcagaggaagagaccccacgcggaggggactgcgtggctctgggagcaactctgaggggctcgggccggcggcttcgcngaaggggcttgcgccggcaagaacccnaatcnaaaaccaanccccggacaattgggaaccggggaaaaaacccaagaatttggccttcccttnggacaaggcggangccaanaaggagggnccaggacaacgaggacaattctggccccaacttganaaaanaaagggtccccccgcccccgagcatcaagccttttgaaaaccanagttttggactcttg

SEQ ID NO: 214923 - DNA, 600 bp, Canis familiaris
  misc_feature (395)..(395): n is a, c, g, or t
  misc_feature (401)..(401): n is a, c, g, or t
  misc_feature (414)..(414): n is a, c, g, or t
  misc_feature (440)..(440): n is a, c, g, or t
  misc_feature (485)..(485): n is a, c, g, or t
  misc_feature (514)..(514): n is a, c, g, or t
  misc_feature (530)..(530): n is a, c, g, or t
  misc_feature (549)..(549): n is a, c, g, or t
  misc_feature (579)..(579): n is a, c, g, or t
  misc_feature (597)..(597): n is a, c, g, or t
atgtcttaacaatttgccctgtgtcaaccttttgactcctatttctagatctgtccttgaagatatacctgtgcaatataaaaagtatatgcacatgggtgttcatgacagcattacaaaaagtaacaaaagacaacaaataaaccattagaaacaactataagggggtgcctgggtggctcagtggttgagcgtcggcctttggctcaggctgtgatcccggggtcctgggattgagtcccacatcaggcttccctcagggagcctgcttctccctctgcctatgtctctgctctctctacacctcttatgaataaataaataatatatttttttaaagaaataactataagtacacccacacagtagaaaactacttatttataaaaacatangatggnaaatctcttctgngataagaacatgaatatatctatatnggtccattgcaaaagaaccataagggggcaaaccagaactactgnaaatcttctttttgggaaggtgtggtgantcggtggaaaaaaatntttgggataaacttttggnacacatttaaaagctgccttgataaataancttttatttccaaaatgngtt

SEQ ID NO: 214924 - DNA, 488 bp, Canis familiaris; identical to SEQ ID NO: 4817
  misc_feature (446)..(446): n is a, c, g, or t
  misc_feature (461)..(461): n is a, c, g, or t
  misc_feature (465)..(465): n is a, c, g, or t

SEQ ID NO: 214925 - DNA, 432 bp, Canis familiaris; identical to SEQ ID NO: 4818
  misc_feature (301)..(301): n is a, c, g, or t
  misc_feature (322)..(322): n is a, c, g, or t
  misc_feature (324)..(324): n is a, c, g, or t
  misc_feature (358)..(358): n is a, c, g, or t
  misc_feature (373)..(374): n is a, c, g, or t
  misc_feature (389)..(389): n is a, c, g, or t
  misc_feature (406)..(406): n is a, c, g, or t

SEQ ID NO: 214926 - DNA, 600 bp, Canis familiaris
  misc_feature (276)..(276): n is a, c, g, or t
  misc_feature (285)..(285): n is a, c, g, or t
  misc_feature (386)..(386): n is a, c, g, or t
  misc_feature (399)..(399): n is a, c, g, or t
  misc_feature (420)..(420): n is a, c, g, or t
  misc_feature (423)..(423): n is a, c, g, or t
  misc_feature (486)..(486): n is a, c, g, or t
  misc_feature (523)..(523): n is a, c, g, or t
  misc_feature (544)..(544): n is a, c, g, or t
ctcgagagctggggctgggcctggggttgggcctgaaagagaaggaagaggcagtggtggctgcagcagccgggctggaagaggctagcgcagcagtggctgttggggcaggaggtgcccccaccggccctgccgtcattggtcccagcctgccgttggccctggccatgcctttgcctgagcctgagcccctgcctctaccgctggaagttgtacgaggcctactgcccccactgcgtattcctgagctcctgtccctgcgtgcacgaccccggnccccacggnctgagccaccccctggcctcatggctcttgaggtcccagagcccttgggtgaggacaagaagaaaggaaagccagagaaattgaaacgctgcatttcacancaactgggagcanctgggaggacccaatcttctntantgggatgcaaaataacttccggatcttttttggggacttggccaatgaaatgaatgatacatnttgggacgagccttaacccgtttcaatccttcttaanggtaaggggatccaaacaacncacggcaaaacaaaggctatggcttttcagtttaagatccaacactaccttccccc

SEQ ID NO: 214927 - DNA, 600 bp, Canis familiaris
  misc_feature (186)..(186): n is a, c, g, or t
  misc_feature (423)..(423): n is a, c, g, or t
  misc_feature (439)..(439): n is a, c, g, or t
  misc_feature (513)..(513): n is a, c, g, or t
  misc_feature (551)..(551): n is a, c, g, or t
  misc_feature (572)..(572): n is a, c, g, or t
  misc_feature (594)..(594): n is a, c, g, or t
aaaatttaaaaaaaaaaaaggggccttttaaacttcctctggcaaggtcttattcattttggtcttttttttttttttttttcctgagtaaattgtaaatggcttttaatttccttttcaagtttgctctttgttactctggatatgtcagtatagataggtttttgaaataaaaatgttactcanaagctggaacaagaatgtgacaacaaatatacatggtttaaattgtgttagaacactcaagtttaagagctttgtaatttttactcaagtaggcaagtactattacgacttaatcatccctttttgttaaataatagatctgagtgggacatacttctgaaggatgtgcaatggtcaatcataaagtgtggacaaaaactgacaagcaggaagcttatgtcctcaatggagaagtancatgttggtttccaanaacgttcaattttgaaaacatgtggaccacccttttcttgaagcactggttcccctgttgaacttgtagggatnacaggggttggctcaatcaagtaagaatcaacattttnttttttccccagccaaggtanggcttggaatagcattgcctanaaaaaa

SEQ ID NO: 214928 - DNA, 211 bp, Canis familiaris; identical to SEQ ID NO: 4821
  misc_feature (59)..(59): n is a, c, g, or t
  misc_feature (74)..(74): n is a, c, g, or t
  misc_feature (82)..(82): n is a, c, g, or t
  misc_feature (110)..(110): n is a, c, g, or t
  misc_feature (112)..(112): n is a, c, g, or t
  misc_feature (153)..(153): n is a, c, g, or t
  misc_feature (164)..(164): n is a, c, g, or t
  misc_feature (179)..(179): n is a, c, g, or t

SEQ ID NO: 214929 - DNA, 567 bp, Canis familiaris; identical to SEQ ID NO: 4822
  misc_feature (457)..(457): n is a, c, g, or t
  misc_feature (483)..(483): n is a, c, g, or t
  misc_feature (485)..(485): n is a, c, g, or t
  misc_feature (490)..(490): n is a, c, g, or t
  misc_feature (514)..(514): n is a, c, g, or t
  misc_feature (550)..(550): n is a, c, g, or t

SEQ ID NO: 214930 - DNA, 600 bp, Canis familiaris
  misc_feature (374)..(374): n is a, c, g, or t
  misc_feature (446)..(446): n is a, c, g, or t
  misc_feature (456)..(456): n is a, c, g, or t
  misc_feature (493)..(493): n is a, c, g, or t
  misc_feature (517)..(518): n is a, c, g, or t
  misc_feature (520)..(520): n is a, c, g, or t
  misc_feature (558)..(558): n is a, c, g, or t
  misc_feature (568)..(568): n is a, c, g, or t
ccgcccggtgttaccggtactgtaagaacaagccgtatccaaagtcacgcttctgcagaggtgtccctgatgccaagattcgcatctttgatctggggcggaagaaggcaaaagtggatgagttcccattatgtggccacatggtgtcagatgagtatgagcagctctcctctgaagccctggaggctgcccgtatttgtgccaacaagtacatggtgaaaagctgtggcaaagatggttttcacatccgagtgcggctccatcccttccatgttatccgtatcaacaagatgttgtcctgtgctggagctgacaggctgcagacaggtatgcgaggtgcctttgggaaaccccaaggcacaataaccaaggtncacattgggcaaatcattatgtcattcgtccaacttgaaaacaaaggacattttgattgagggccttcccanggccaaattnaagttcctggccgccaaaaaaccaaatttcaaaaaangggggtttctaaatttaatgcggnncnaatttaaaaattgggggccgaaaacgggttatccaaanggttgggggnaaaaacatcctaatcggggcccttggcaaaag

SEQ ID NO: 214931 - DNA, 676 bp, Canis familiaris; identical to SEQ ID NO: 4824
  misc_feature (416)..(416): n is a, c, g, or t
  misc_feature (449)..(449): n is a, c, g, or t
  misc_feature (457)..(457): n is a, c, g, or t
  misc_feature (472)..(472): n is a, c, g, or t
  misc_feature (486)..(486): n is a, c, g, or t
  misc_feature (563)..(563): n is a, c, g, or t
  misc_feature (593)..(593): n is a, c, g, or t
  misc_feature (610)..(610): n is a, c, g, or t
  misc_feature (618)..(618): n is a, c, g, or t
  misc_feature (646)..(646): n is a, c, g, or t

SEQ ID NO: 214932 - DNA, 600 bp, Canis familiaris
  misc_feature (213)..(213): n is a, c, g, or t
  misc_feature (436)..(436): n is a, c, g, or t
  misc_feature (534)..(534): n is a, c, g, or t
  misc_feature (551)..(551): n is a, c, g, or t
  misc_feature (595)..(595): n is a, c, g, or t
gacaataaatgagcataaaagtaaaatcatctttacgcagatgactgaactcccaggatctgcaaaggccccctattaccttctctgcacaaaccctaaaacacacacacacacacacacacatacacacacacttttttacttttaacctactctgtacatgctacatttgttatctttttcctaggtccacccagaattatcccatctttncgaatccttatccctatgaatcttcaaaatatgttaaattatgtgttatatgtttgctttctataaattctttaaaattaatttatatatactttgtgaagtctactgtaaagggatgtccgttgtcattgattaaatgtaatgtttatgattattttggtaaaaataacttcggatgctaggctcttgttaagaaataaaattttcatgacaaaattgcttntattgggaaatatatgatttggcatactttatttttatcacaatctattccagataaataataatttggggacattgtacttaaacctattgagcccntttggatggaatgaaangaaactgtcctggaactaaattgaattttggcgacaaaaatatntatat

SEQ ID NO: 214933 - DNA, 513 bp, Canis familiaris; identical to SEQ ID NO: 4826
  misc_feature (452)..(452): n is a, c, g, or t
  misc_feature (484)..(484): n is a, c, g, or t
  misc_feature (487)..(487): n is a, c, g, or t

SEQ ID NO: 214934 - DNA, 401 bp, Canis familiaris; identical to SEQ ID NO: 4827
  misc_feature (364)..(364): n is a, c, g, or t

SEQ ID NO: 214935 - DNA, 412 bp, Canis familiaris; identical to SEQ ID NO: 4828
  misc_feature (242)..(242): n is a, c, g, or t
  misc_feature (302)..(302): n is a, c, g, or t
  misc_feature (392)..(392): n is a, c, g, or t
  misc_feature (398)..(398): n is a, c, g, or t

SEQ ID NO: 214936 - DNA, 147 bp, Canis familiaris; identical to SEQ ID NO: 4829
  misc_feature (2)..(3): n is a, c, g, or t
  misc_feature (53)..(53): n is a, c, g, or t
  misc_feature (66)..(66): n is a, c, g, or t
  misc_feature (109)..(109): n is a, c, g, or t
  misc_feature (111)..(111): n is a, c, g, or t
  misc_feature (116)..(116): n is a, c, g, or t

SEQ ID NO: 214937 - DNA, 365 bp, Canis familiaris; identical to SEQ ID NO: 4830
  misc_feature (340)..(340): n is a, c, g, or t

SEQ ID NO: 214938 - DNA, 575 bp, Canis familiaris; identical to SEQ ID NO: 4831
  misc_feature (345)..(345): n is a, c, g, or t
  misc_feature (401)..(401): n is a, c, g, or t
  misc_feature (421)..(421): n is a, c, g, or t
  misc_feature (427)..(427): n is a, c, g, or t
  misc_feature (468)..(468): n is a, c, g, or t
  misc_feature (483)..(483): n is a, c, g, or t
  misc_feature (501)..(501): n is a, c, g, or t
  misc_feature (527)..(527): n is a, c, g, or t
  misc_feature (572)..(572): n is a, c, g, or t

SEQ ID NO: 214939 - DNA, 600 bp, Canis familiaris
  misc_feature (414)..(414): n is a, c, g, or t
  misc_feature (458)..(458): n is a, c, g, or t
  misc_feature (483)..(483): n is a, c, g, or t
  misc_feature (491)..(491): n is a, c, g, or t
  misc_feature (498)..(498): n is a, c, g, or t
  misc_feature (514)..(514): n is a, c, g, or t
  misc_feature (533)..(533): n is a, c, g, or t
  misc_feature (560)..(560): n is a, c, g, or t
  misc_feature (574)..(574): n is a, c, g, or t
  misc_feature (587)..(587): n is a, c, g, or t
  misc_feature (592)..(592): n is a, c, g, or t
atgctgacggcgctgctgctgctccccgcgctggccggcctcctccccgccgcagacggacaggccttccacctggggagatgcccgacgccgccggtgcaggagaacttcgacgtgcacaagtatcttggacgatggtacgaaattgagaagatcccagtgagctttgagaagggaagttgcatccaagccaactattcgctaatggaaaacggaaacatcaaagtgataaaccaggagttgagatctgatggcaccgtgaatcaaatcgaaggcgaagccacccagggcaaccttacagagcctgccaagctgggagttaagtttttctggttgatgccatcagctccatactgggtctgccaccgactacgagaactacgcccttgtgtactctgaccacaatcggctggntttttcacatggatcatgtttggatcttgggaagaaaccttatnttcttccagaaacaagtgacctatntgaaaganatctggncttttaatgacattgncatcgagaaaatgactatnacagaatcaggtgacttgccccaatcnttggaaaggttcangggggaaccttgngttcnttcacgtt

SEQ ID NO: 214940 - DNA, 494 bp, Canis familiaris; identical to SEQ ID NO: 4833
  misc_feature (328)..(328): n is a, c, g, or t
  misc_feature (373)..(373): n is a, c, g, or t
  misc_feature (385)..(385): n is a, c, g, or t
  misc_feature (408)..(408): n is a, c, g, or t
  misc_feature (421)..(421): n is a, c, g, or t
  misc_feature (428)..(428): n is a, c, g, or t
  misc_feature (435)..(435): n is a, c, g, or t
  misc_feature (449)..(449): n is a, c, g, or t
  misc_feature (481)..(481): n is a, c, g, or t

SEQ ID NO: 214941 - DNA, 464 bp, Canis familiaris; identical to SEQ ID NO: 4834
  misc_feature (443)..(443): n is a, c, g, or t
  misc_feature (451)..(451): n is a, c, g, or t

SEQ ID NO: 214942 - DNA, 481 bp, Canis familiaris; identical to SEQ ID NO: 4835
  misc_feature (89)..(89): n is a, c, g, or t
  misc_feature (440)..(440): n is a, c, g, or t
  misc_feature (458)..(458): n is a, c, g, or t

SEQ ID NO: 214943 - DNA, 522 bp, Canis familiaris; identical to SEQ ID NO: 4836
  misc_feature (407)..(407): n is a, c, g, or t
  misc_feature (429)..(429): n is a, c, g, or t
  misc_feature (479)..(479): n is a, c, g, or t
  misc_feature (481)..(481): n is a, c, g, or t

SEQ ID NO: 214944 - DNA, 600 bp, Canis familiaris
  misc_feature (416)..(416): n is a, c, g, or t
  misc_feature (457)..(457): n is a, c, g, or t
  misc_feature (459)..(459): n is a, c, g, or t
  misc_feature (467)..(467): n is a, c, g, or t
  misc_feature (485)..(485): n is a, c, g, or t
  misc_feature (519)..(519): n is a, c, g, or t
  misc_feature (553)..(553): n is a, c, g, or t
  misc_feature (569)..(569): n is a, c, g, or t
  misc_feature (572)..(572): n is a, c, g, or t
gtatagatggtttagtaaagatgtagtttgtaatgttttatccatttagcatgtgtttatttttccttatgtactcagaggtgacttatttgttcagctcagtgatattatacagctaagtatatcattcattagcaaaaggagaagcaatctcaatctaacatcagaaatgtttatttaatattgagttgaatatttgactctaacacttttctacatacaaaacacaagtatcttgagggttcttcaaaattgcattgtagaggaattcagtatgtcataaatacttaaagatttgacactagactgtagtatccatatgttggttaattttcttatgagccccatgatggaaagacttaaagatgaatttgagaaaaactgaaaattagattatcagggtctgttaaaattgntacatgtatcttgcttaagttttggttcattaatttatatncnctcaattncataaagcaaaatttggnggaaacacctgaagttgggcaatatttcataganatacttttttatcctgggttttctacttatacangctgctttcttttttntanatggtaaaatggtaaggaactttaaaac

SEQ ID NO: 214945 - DNA, 637 bp, Canis familiaris; identical to SEQ ID NO: 4838
  misc_feature (434)..(434): n is a, c, g, or t
  misc_feature (444)..(444): n is a, c, g, or t
  misc_feature (495)..(495): n is a, c, g, or t
  misc_feature (524)..(525): n is a, c, g, or t
  misc_feature (558)..(558): n is a, c, g, or t
  misc_feature (563)..(563): n is a, c, g, or t
  misc_feature (583)..(583): n is a, c, g, or t
  misc_feature (625)..(625): n is a, c, g, or t

SEQ ID NO: 214946 - DNA, 233 bp, Canis familiaris; identical to SEQ ID NO: 4839
  misc_feature (49)..(49): n is a, c, g, or t
  misc_feature (55)..(55): n is a, c, g, or t
  misc_feature (68)..(68): n is a, c, g, or t
  misc_feature (115)..(115): n is a, c, g, or t
  misc_feature (121)..(121): n is a, c, g, or t
  misc_feature (205)..(205): n is a, c, g, or t

SEQ ID NO: 214947 - DNA, 526 bp, Canis familiaris; identical to SEQ ID NO: 4840
  misc_feature (432)..(432): n is a, c, g, or t
  misc_feature (479)..(479): n is a, c, g, or t

SEQ ID NO: 214948 - DNA, 477 bp, Canis familiaris; identical to SEQ ID NO: 4841
  misc_feature (361)..(361): n is a, c, g, or t
  misc_feature (384)..(384): n is a, c, g, or t
  misc_feature (409)..(409): n is a, c, g, or t
  misc_feature (419)..(419): n is a, c, g, or t

SEQ ID NO: 214949 - DNA, 214 bp, Canis familiaris; identical to SEQ ID NO: 4842

SEQ ID NO: 214950 - DNA, 567 bp, Canis familiaris; identical to SEQ ID NO: 4843
  misc_feature (209)..(209): n is a, c, g, or t
  misc_feature (314)..(314): n is a, c, g, or t
  misc_feature (418)..(418): n is a, c, g, or t
  misc_feature (426)..(426): n is a, c, g, or t
  misc_feature (428)..(428): n is a, c, g, or t
  misc_feature (454)..(454): n is a, c, g, or t
  misc_feature (475)..(475): n is a, c, g, or t
  misc_feature (490)..(490): n is a, c, g, or t
  misc_feature (499)..(499): n is a, c, g, or t
  misc_feature (505)..(505): n is a, c, g, or t
  misc_feature (532)..(532): n is a, c, g, or t
  misc_feature (536)..(536): n is a, c, g, or t
  misc_feature (541)..(541): n is a, c, g, or t
  misc_feature (563)..(563): n is a, c, g, or t

SEQ ID NO: 214951 - DNA, 482 bp, Canis familiaris; identical to SEQ ID NO: 4844
  misc_feature (293)..(293): n is a, c, g, or t
  misc_feature (355)..(355): n is a, c, g, or t
  misc_feature (378)..(378): n is a, c, g, or t
  misc_feature (404)..(404): n is a, c, g, or t
  misc_feature (455)..(455): n is a, c, g, or t
  misc_feature (457)..(457): n is a, c, g, or t
  misc_feature (463)..(463): n is a, c, g, or t

SEQ ID NO: 214952 - DNA, 424 bp, Canis familiaris; identical to SEQ ID NO: 4845
  misc_feature (27)..(27): n is a, c, g, or t
  misc_feature (216)..(216): n is a, c, g, or t
  misc_feature (366)..(366): n is a, c, g, or t

SEQ ID NO: 214953 - DNA, 572 bp, Canis familiaris; identical to SEQ ID NO: 4846
  misc_feature (452)..(452): n is a, c, g, or t
  misc_feature (468)..(468): n is a, c, g, or t
  misc_feature (502)..(502): n is a, c, g, or t
  misc_feature (509)..(510): n is a, c, g, or t
  misc_feature (533)..(533): n is a, c, g, or t
  misc_feature (544)..(544): n is a, c, g, or t
  misc_feature (550)..(550): n is a, c, g, or t
  misc_feature (562)..(562): n is a, c, g, or t

SEQ ID NO: 214954 - DNA, 546 bp, Canis familiaris; identical to SEQ ID NO: 4847
  misc_feature (399)..(399): n is a, c, g, or t
  misc_feature (414)..(414): n is a, c, g, or t
  misc_feature (420)..(420): n is a, c, g, or t
  misc_feature (424)..(424): n is a, c, g, or t
  misc_feature (464)..(464): n is a, c, g, or t
  misc_feature (493)..(493): n is a, c, g, or t
  misc_feature (517)..(517): n is a, c, g, or t
  misc_feature (528)..(528): n is a, c, g, or t

SEQ ID NO: 214955 - DNA, 431 bp, Canis familiaris; identical to SEQ ID NO: 4848
  misc_feature (134)..(134): n is a, c, g, or t
  misc_feature (269)..(269): n is a, c, g, or t
  misc_feature (408)..(408): n is a, c, g, or t
  misc_feature (416)..(416): n is a, c, g, or t

SEQ ID NO: 214956 - DNA, 503 bp, Canis familiaris; identical to SEQ ID NO: 4849
  misc_feature (410)..(410): n is a, c, g, or t
  misc_feature (429)..(429): n is a, c, g, or t
  misc_feature (486)..(486): n is a, c, g, or t
  misc_feature (490)..(490): n is a, c, g, or t
  misc_feature (495)..(495): n is a, c, g, or t

SEQ ID NO: 214957 - DNA, 543 bp, Canis familiaris; identical to SEQ ID NO: 4850
  misc_feature (76)..(76): n is a, c, g, or t
  misc_feature (111)..(111): n is a, c, g, or t
  misc_feature (160)..(160): n is a, c, g, or t
  misc_feature (444)..(444): n is a, c, g, or t
  misc_feature (492)..(492): n is a, c, g, or t
  misc_feature (506)..(506): n is a, c, g, or t
  misc_feature (523)..(523): n is a, c, g, or t

SEQ ID NO: 214958 - DNA, 600 bp, Canis familiaris
  misc_feature (144)..(144): n is a, c, g, or t
  misc_feature (352)..(352): n is a, c, g, or t
  misc_feature (384)..(384): n is a, c, g, or t
  misc_feature (417)..(417): n is a, c, g, or t
  misc_feature (430)..(430): n is a, c, g, or t
  misc_feature (479)..(479): n is a, c, g, or t
  misc_feature (510)..(510): n is a, c, g, or t
  misc_feature (546)..(546): n is a, c, g, or t
  misc_feature (564)..(564): n is a, c, g, or t
  misc_feature (595)..(595): n is a, c, g, or t
gccacggtgaccctggaggaccacctggcgtgcaagtgtgagacagtggtggctgctcgacccgtgacccgaaccccggggagttcccaagacctgcgagccaagacaccccaaactcgggtgaccattcggacagtgcgagtncgccggccccccaaggggaagcaccggaagttcaagcacacacatgacaagaaggcactgaaggagaccctcggagcctaggggcatctggaggagattgagggcagggttatttaatatggtatttgctgtatcgcccccatggggtccttggagtgataatattgttcccctcgtcccgtctgtctcgatgcctgattcggacggncaatggtgcttcccttttcgcgcgtcattcgnccaacaacgggtcccttactggccgcaacaccnttgccaaaacttnggaaggaacgggggacccgactcattgtgggttcttcgtgcccaagatntggataatcttaaaaaaccaaggttgttgtnccaatccggtggtcaatggtccggggtggcaaactnaagtggccaagccttagnatgaggcttcttgacggaccagcattcaagnactca

SEQ ID NO: 214959 - DNA, 559 bp, Canis familiaris; identical to SEQ ID NO: 4852
  misc_feature (433)..(433): n is a, c, g, or t
  misc_feature (459)..(459): n is a, c, g, or t
  misc_feature (473)..(473): n is a, c, g, or t

SEQ ID NO: 214960 - DNA, 600 bp, Canis familiaris
  misc_feature (366)..(366): n is a, c, g, or t
  misc_feature (382)..(382): n is a, c, g, or t
  misc_feature (403)..(403): n is a, c, g, or t
  misc_feature (442)..(442): n is a, c, g, or t
  misc_feature (471)..(471): n is a, c, g, or t
  misc_feature (523)..(523): n is a, c, g, or t
  misc_feature (599)..(599): n is a, c, g, or t
tgacctgggcaagggagcagcggtcatcaggagcaaggagccggtggccctggacacctggaccagggtctcactagagcgcaatggccgcaagggtgccatgcgtgtcagtgatgggcctcgcgtgctgggagagtccccgaaatcccgcaaggtgccacacactgtcctcaacctgaaggagccactctatgttggaggggcccctgacttcagcaaactggcccgggcagctgcggtattctctggcttcgatggcgccatccaactggtctccttgaaaggccaccagctgctgtcccaggagcacgtggtgcggtcagtggatgtctcatcttttgcccaccacccttgtactcaggcctngggccacccatgcctnaatggggccttctgcctcctngagaggccttctatgagtgccttgtgccccgggggcttntcagggctttaattgtaaaaggggctgantgagaagtcaacaagggatgtggacgcccttggcttttacggacagactacntcgagtaccttaatgccctgaatgaaagtagaaggccttcaaagaaaccacttttacttaacctgccacggaagcnt

SEQ ID NO: 214961 - DNA, 445 bp, Canis familiaris; identical to SEQ ID NO: 4854

SEQ ID NO: 214962 - DNA, 514 bp, Canis familiaris; identical to SEQ ID NO: 4855
  misc_feature (362)..(362): n is a, c, g, or t
  misc_feature (421)..(421): n is a, c, g, or t
  misc_feature (425)..(425): n is a, c, g, or t
  misc_feature (443)..(443): n is a, c, g, or t
  misc_feature (457)..(457): n is a, c, g, or t
  misc_feature (484)..(484): n is a, c, g, or t
  misc_feature (496)..(496): n is a, c, g, or t

SEQ ID NO: 214963 - DNA, 555 bp, Canis familiaris; identical to SEQ ID NO: 4856
  misc_feature (476)..(476): n is a, c, g, or t
  misc_feature (527)..(528): n is a, c, g, or t

SEQ ID NO: 214964 - DNA, 289 bp, Canis familiaris; identical to SEQ ID NO: 4857

SEQ ID NO: 214965 - DNA, 600 bp, Canis familiaris
  misc_feature (376)..(376): n is a, c, g, or t
  misc_feature (381)..(381): n is a, c, g, or t
  misc_feature (438)..(438): n is a, c, g, or t
  misc_feature (442)..(442): n is a, c, g, or t
  misc_feature (505)..(505): n is a, c, g, or t
  misc_feature (537)..(537): n is a, c, g, or t
  misc_feature (560)..(560): n is a, c, g, or t
  misc_feature (588)..(588): n is a, c, g, or t
cggcgggactgaagagcggcgcgcaccgagggtcgtgggggcggcgcctgcgtcccctgctcgcgcgacatggccttcaacttcggggctccctcgggcacctctggcaccgccgcggcccccgcggcccccgcgggtgggtttggaggatttgggacaacatctacaacagcaggttctgctttcagcttttctgctccagctaacacaggcgctactggactctttggtggtactcagaacaaaggttttggatttggtactggttttggcacaacaactggaagtagtactggtttaggtactggtttgggaacaggactgggatttggaggatttaatacacaagcagcagcaacaagcaaaactacattangtggnctctttagtcaagcccacacaactcttacccaagtccaatcaactgataaatactgnaagngctcttttttgttcaacccttgttggaagatgagagagatgcttttttaagcaaaatggaatnactgcagccttttggggaacaggaaaaggatntttcaacaataacatccaccagnggaattacacaagaaaaacctttgccgnttaaggcagagg

SEQ ID NO: 214966 - DNA, 281 bp, Canis familiaris; identical to SEQ ID NO: 4859

SEQ ID NO: 214967 - DNA, 600 bp, Canis familiaris
  misc_feature (320)..(320): n is a, c, g, or t
  misc_feature (424)..(424): n is a, c, g, or t
  misc_feature (449)..(449): n is a, c, g, or t
  misc_feature (512)..(512): n is a, c, g, or t
  misc_feature (521)..(521): n is a, c, g, or t
  misc_feature (552)..(552): n is a, c, g, or t
cctcggagctggaacagtgagcagaatgagtacctcacaggaccagagtggccgctccagtaatagagaaccccttttgaggtgttgtgatgcacggagggacttggagcttgctattggtggagttctccgggctgaacagcaaattaaagataacttacaagaggtcaaagcccagattcacagctgcataagccgtcatctggaatgcctccgaagccgtgaggtgtggctgtatgaacaggtagatctcatctatcagcttaaagaggagacacttcagcagcaggcccaacagctctactggttactgggccagntcaattgtcttattcatcaactggagtgcacccaaaacaaaaatctagcttatcaagtgtttgtgtgcctggagagactggcaatttgaccttcaaacctgaanattgactatctattgtttgaagaanaaacaattgttttggccaggccataacacatttggatccttaaaacatccaaatctgggcatntattggtanctaatataaaatgggcttctgggaaaaggtntttcatgccgaaaaatagatcacatacgtgttttaagaggtctgagaa

SEQ ID NO: 214968 - DNA, 600 bp, Canis familiaris
  misc_feature (412)..(412): n is a, c, g, or t
  misc_feature (448)..(448): n is a, c, g, or t
  misc_feature (483)..(483): n is a, c, g, or t
  misc_feature (493)..(493): n is a, c, g, or t
  misc_feature (504)..(504): n is a, c, g, or t
  misc_feature (518)..(518): n is a, c, g, or t
  misc_feature (595)..(595): n is a, c, g, or t
aaaggactcttctgaaacgtactcaagtctttgatttcgagtttgaatttgaaaccagttcgttttctctgcccatcgcatcttaacatgtagggcatctttctccccataggcaaaccacacagggctcactttgtcacttgtggctgctttgaagacaatgacctaactccttgacgcctctcttagggctccccggagttctattttaaggcaaaccatccccaacatgccttccaaatcggtgaaaatctatccagtcatttttctgcgcttcaataacacaaactgagccttttatctaggggcctgggtattaaaggataaaggggtccttggggattttctcaggcaaagggctcaagaataacctggcctcttctggacaattaatgtgaaagcaggatatggnccggatcttttttaggccaattaactcttacttgtntgggagagtggagcaaagaggaatgaaaatggctnaactttccgnctgtctaggtnttccaagtgcttanaagggaaaaattgatctttctttcagggaaaacttacttccatccccagtttattaattaattaccggaactggganaatgg

SEQ ID NO: 214969 - DNA, 600 bp, Canis familiaris
  misc_feature (432)..(432): n is a, c, g, or t
  misc_feature (447)..(447): n is a, c, g, or t
  misc_feature (561)..(561): n is a, c, g, or t
  misc_feature (591)..(591): n is a, c, g, or t
  misc_feature (598)..(598): n is a, c, g, or t
gacaaaatagaattcaatatgaaaagcgttatgagacaaatgcaattctcaaaaattgataaaagaacattccactacaagtcatgaatctatgcatctaacaatagctccaaaatttataaaacaagtactatgagaaatgtcaagagaaagtgacaaatccacaattacagagagacaggtcaacatacttttaggaaggagacacaaataatagttaacacttactgggcacttctttgcgagtggcactgaactatacttttccatgcattatctaaagctataggaaatgttaatagtaatttgacaagtcatatacatacaccatatacatataccataaatacctttgtacctgttaatagagaataaacattttttcagacattcagtagatgttcactggaagaccacacattatgcacttgncccccaataacagtnacaggacagggacaacaggccacaccaccctggaggcaacatggctggcaaggagtccaaggaaatgaacattaccctggattggcaatagctcttgtgaagactaatttggantatgaataagggggcatactttttgcatancaatggntt

SEQ ID NO: 214970 - DNA, 600 bp, Canis familiaris
  misc_feature (478)..(478): n is a, c, g, or t
  misc_feature (482)..(482): n is a, c, g, or t
  misc_feature (513)..(513): n is a, c, g, or t
  misc_feature (534)..(534): n is a, c, g, or t
  misc_feature (574)..(574): n is a, c, g, or t
aaccggggcccgagctacggcctgagccgcgaggtgcaggagaagatcgagcagaagtacgacgcggacctggagaacaagctggtggactggatcatcctgcagtgcgccgaggacatcgcgcacccgccccccggcagggcccactttcagcaatggttaatggacgggacggtcctgtgcaagctgataaacagtttatacccacccggacaggagcctattcccaagatctcagagtcgaagatggcttttaagcagatggagcaaatctcccagttcctaaaagcagcagagatctacggggtcaggaccactgacatttttcagacggtggatctgtgggaagggaaggacatggcagctgtgcagaggaccctgatggctctcggcagcgtttgcagtcaccaaggatgatggctgttacaggggaaaagccttctggtttacaaggaaagcccacagaatcggcgaggantttnagaggagcaagtttcgccagggacagaacgnaatcggcttgaaatgggcagnaacaagggggctccaagccgcatgacgggtaccgggatgnccagcagatattgtagaggttgcttc

SEQ ID NO: 214971 - DNA, 600 bp, Canis familiaris
  misc_feature (434)..(434): n is a, c, g, or t
  misc_feature (536)..(536): n is a, c, g, or t
  misc_feature (548)..(548): n is a, c, g, or t
cccggcgccgccgctcgcctccccagtgtgctgactcggctccccggacctcagcaggatggaagagaagctgaagaaaaccaaaatcatctttgtggtgggagggcccggctcagggaagggcacccagtgtgagaagattgtgcagaagtacggctacacccacctctccaccggggacctcctgagggccgaggtcagctcaggctcggccaggggcaagatgctgtcggaaatcatggagaaggggcagctggtgccactggagacagtgctggacatgctccgagatgccatggtggccaaggtagatacttcaaaggcttcctgatcgatggctaccctcgggaggtacagcagggagaggagtttgagcggaggattggacaagcccacgctgcttgtgtatgtggaccaagcccagagaccatganccacggttcttgaacgtggagagacaacgggcgagtggttgcaatgaggagaccatcaaaaacgggtggggacctattcaaggcccaaaacctgtaattgcntttttaaaaaanggcatctacccaaggcaatgttaaggttcctgggcaatgtttttccaagttt

SEQ ID NO: 214972 - DNA, 600 bp, Canis familiaris
  misc_feature (408)..(408): n is a, c, g, or t
  misc_feature (452)..(452): n is a, c, g, or t
  misc_feature (492)..(492): n is a, c, g, or t
  misc_feature (509)..(509): n is a, c, g, or t
  misc_feature (534)..(534): n is a, c, g, or t
  misc_feature (550)..(550): n is a, c, g, or t
  misc_feature (561)..(561): n is a, c, g, or t
aggctgcagcggccaggagcgaccccgccccctccccgctcgctctgggctatgtctggcttttgtggaaagcagattcaacatatcgaagggaaatgaaaacgcagacggcagcttccagatcaacagccattactggtgcaatgatgacaggagtcactcagaaaacatttgccacgaggactgtcaagacgtactgagcctcaatcttctctcagccatcagctgtgcaaaaaaagattgtctctggagcaggggggtagcatggaggttgcactgtgcaggccggccactctcctactggatgacaggatgtttctcgggatgagacaggacacagggctgccgtagagtcattccagagctcctcttctcactcaggaattcatttctccttcctcttggctntgcttcaaggtattttcttttcttccatttaccaataaacctgncataagccccaagaataaatgggttttttgggctttcctncttgaccctgtctgggnccaagcccctggttttgccttttanttgcaaaccaagaggnccccatggaanaagtggtatatttggataattattaaagattccttgggc

SEQ ID NO: 214973 - DNA, 600 bp, Canis familiaris
  misc_feature (482)..(482): n is a, c, g, or t
  misc_feature (519)..(519): n is a, c, g, or t
  misc_feature (526)..(526): n is a, c, g, or t
  misc_feature (528)..(528): n is a, c, g, or t
  misc_feature (546)..(546): n is a, c, g, or t
  misc_feature (597)..(597): n is a, c, g, or t
gcagaagacatcccactgctcttcagcctcttatcagatgtgttccccggggtccaataccaccggggcgaaatgactgcgctccgagaagagctgaagaaggtgtgccaggaaatgtacctgacatatggagatggagaagaagttggcggcatgtgggttgagaaggtcctccagctctatcagatcacccagatcaaccatggcctgatgatggtggggccctcaggaagtgggaagagcatggcttggcgtgtgctcctaaaggctttggagaggctggagggtgtggagggtgtggcccatatcattgaccccaaggccatcagcaaagaccacctttatggaaccctggaccccaacaccagggaatggacggatggactgttcacacatgtcctgcgaaagatcatagacaatgtgaggggtgaactacagaagcccccaatggattgtcttttgtggtgacgtggaccccagtnggtggagaacttgactcagtggttgatgacaccaacntttgatntngccaatggggagcgcctnaaaccttcacccaatggcgaataatgtttgaggggaggacttaaattgccncct

SEQ ID NO: 214974 - DNA, 600 bp, Canis familiaris
  misc_feature (419)..(419): n is a, c, g, or t
  misc_feature (422)..(422): n is a, c, g, or t
  misc_feature (429)..(429): n is a, c, g, or t
  misc_feature (466)..(466): n is a, c, g, or t
  misc_feature (546)..(546): n is a, c, g, or t
  misc_feature (572)..(572): n is a, c, g, or t
ttggtttaaaatgttctattttttaagtcattccatttgaaactttttaatgaacctgactattctaaaatctgttgttttagtgaggctctgaaatgagcaaaagtagactttttagagtagaataaatataaaaacatttatgactttccggaaactctaaatcaaagttttaaaaagatgtttggatatatttgagtactcagatcatgaaaatagaaattgctctgccaacaactaaaaggacagactgacgggaaatgagacacctggttgacttaacccttaagcagacaatgctgttaataactaatggcttctctgatatttattataagttttagtactgatcttttcccaatgctgcacactcctgtgtttggaaccttattttaatggctttgcaacaaaaatcctgnatncaggttnctataatttaagaaaagcacccaataaaggttttctnttaacagaccagatgcacccgaaatatggggctatatgataccaaacatgtttaactttttagggcaaatactcacctgnaagtttagcttaaggtggacttttgnggaaaaaaaaactttggtctcaaattca

SEQ ID NO: 214975 - DNA, 600 bp, Canis familiaris
  misc_feature (452)..(452): n is a, c, g, or t
  misc_feature (514)..(514): n is a, c, g, or t
  misc_feature (540)..(540): n is a, c, g, or t
  misc_feature (557)..(557): n is a, c, g, or t
  misc_feature (595)..(595): n is a, c, g, or t
  misc_feature (599)..(599): n is a, c, g, or t
tgatagttctaaaaggttactagtgcctccagagtcactcagctctatttccagagcaactctcctagcagtggacatccctcttccctccaggtcttgtctcttcctggaatgtccacaagcagcagatacagctggtctccccacagctgctgaaaggaaccctggtgtgacctctcagcacagaaactggtcttccccgatgtgagcaggcttccggggaacacagaatccacatgaccttaagattatctacaactccatcgtggtgctgttgtcttccaggctcactggtccctcctcggccagcggctggggcctcctcaccagtggtggagagaggttcttttcaacaacctggttattcaaggaaagaggttctggactcccccattggtggttcttcaacaggaagtggcaggtggacaaggctggtgtagaatccggttttnaaagggcagtaatggattggcttttgtgaccaaggaacaaatcaatcctaagacattttatngaggggatgaatcttttgtcaagttnagtttggccttaacctntgtcaccccaagacaagtttaccctttttgggatggtnaggna

SEQ ID NO: 214976 - DNA, 560 bp, Canis familiaris; identical to SEQ ID NO: 4869
  misc_feature (319)..(319): n is a, c, g, or t
  misc_feature (439)..(439): n is a, c, g, or t
  misc_feature (459)..(459): n is a, c, g, or t
  misc_feature (461)..(461): n is a, c, g, or t
  misc_feature (464)..(464): n is a, c, g, or t

SEQ ID NO: 214977 - DNA, 531 bp, Canis familiaris; identical to SEQ ID NO: 4870
  misc_feature (393)..(393): n is a, c, g, or t
  misc_feature (458)..(458): n is a, c, g, or t

SEQ ID NO: 214978 - DNA, 600 bp, Canis familiaris
  misc_feature (424)..(424): n is a, c, g, or t
  misc_feature (537)..(537): n is a, c, g, or t
  misc_feature (551)..(551): n is a, c, g, or t
agagctactgtatttagacttaggataaaaggcagagtaacattacttaaaaaaaggatatgtttacatttaattttggctaccaggagtttattttctttaatttaaaatttttttgccaatggtgccaagtaatgtgaatgctaatattgcttaaaaaattaagttacttttgctaaacagataatcataagatgaatccgtatatagcttaacaccatccactcactccaacaaaagaacacttagaacgatcaaaatctgacaaaagaaatagtgtgaaaagtaggaaaacgtctgacgttttcatatctcctgctggaaatcagaaaatgtaaccaaaaaatgcacaaaaaatactaaaaaatttaaaagatccaactggtctcgtagggtggcatgggctatactctttccatataangggggccaaagaaatctgtgctttaaaaattaaactactaacgttaaatgggagaataaagctcgcatttctgatgcccgttaaaattccaggttaagttcaggatcagtggngtaaactgaaaaanagttttttttggtttggtggcacctgaagtaaactaaggttgtgggaag

SEQ ID NO: 214979 - DNA, 600 bp, Canis familiaris
  misc_feature (438)..(438): n is a, c, g, or t
  misc_feature (463)..(463): n is a, c, g, or t
  misc_feature (509)..(509): n is a, c, g, or t
  misc_feature (531)..(531): n is a, c, g, or t
  misc_feature (535)..(535): n is a, c, g, or t
  misc_feature (546)..(546): n is a, c, g, or t
  misc_feature (584)..(584): n is a, c, g, or t
ctaccacttgagggggctgactcacagaaggggacagatagagtgaacaacactcctatcccattggctgctattctgaaaccattcgattgacttcctgaggttgggctgggtgggggctgctcagctggccactgcaaattatacctgcccatgtttctaaaagcgatttccagctgttctgtaaatacctggtgctaacgtcccatgccgctccgccgtgatgcacctgcccacccgcacgaaggtcccctgttggaacagatgtggggatgttgctttgtcatgtacaggttaccctttggttatttttttctttatgccccttgaaactaatcctgtcaagaaaccataccgggctagctgaagggtggggagagggcagatgagccccaccatgctctggagagaacataacctgcaataaaacaagtctanaaggctaagcttgcccgggggtggngggcaaggacaagttttgttccttgtcaagttggcccctctgcttntccgggggaattggttggttcntaanacctggctggnttttgggcctttttccggggccaacttgctggcccccnaaattccccagggaga

SEQ ID NO: 214980 - DNA, 454 bp, Canis familiaris; identical to SEQ ID NO: 4873
  misc_feature (165)..(165): n is a, c, g, or t
  misc_feature (417)..(417): n is a, c, g, or t

SEQ ID NO: 214981 - DNA, 600 bp, Canis familiaris
  misc_feature (477)..(477): n is a, c, g, or t
  misc_feature (490)..(490): n is a, c, g, or t
  misc_feature (501)..(501): n is a, c, g, or t
  misc_feature (549)..(549): n is a, c, g, or t
  misc_feature (565)..(565): n is a, c, g, or t
  misc_feature (585)..(585): n is a, c, g, or t
aaaggacatgcatgtgctgtaagttcctaggtgcaagctttttcttgttctgttttaaacagctttataaactattgttcatagaagatattatgtacatttatttcagataaaggaaaataagtttactttgtatctgaactcaaaacaaagtagttgtatattttaacatctgaaattgggatttcccgatgtgacacatcactaatgcaaacccttccagcctatcagacaccaggctgcctactggtaatctgtgtacagtatataaacatgtaaaaataggttgtattttactctatgtatgatgctaatcaatgaacactttatttattttacagagaaaacttatctgtgaactttactatatatctgtttattttattttattattttttttttaataaaaaaagggttttaaatgctatgcagtcattagtagaaacggtttaaggatgctggctggcttgtactctntatggctgcaggnaatcaggatcnttttgcatggatccaagggagtagttactcaagaaagggctggattgntttcctggtccagtgngcttttttaaaaggactggnttagatatgctccat

SEQ ID NO: 214982 - DNA, 568 bp, Canis familiaris; identical to SEQ ID NO: 4875
  misc_feature (420)..(420): n is a, c, g, or t
  misc_feature (422)..(422): n is a, c, g, or t
  misc_feature (425)..(425): n is a, c, g, or t
  misc_feature (460)..(460): n is a, c, g, or t
  misc_feature (500)..(500): n is a, c, g, or t
  misc_feature (526)..(526): n is a, c, g, or t
  misc_feature (531)..(531): n is a, c, g, or t
  misc_feature (542)..(542): n is a, c, g, or t

SEQ ID NO: 214983 - DNA, 600 bp, Canis familiaris
  misc_feature (368)..(368): n is a, c, g, or t
  misc_feature (373)..(373): n is a, c, g, or t
  misc_feature (422)..(422): n is a, c, g, or t
  misc_feature (425)..(425): n is a, c, g, or t
  misc_feature (479)..(479): n is a, c, g, or t
  misc_feature (481)..(481): n is a, c, g, or t
  misc_feature (485)..(485): n is a, c, g, or t
  misc_feature (521)..(521): n is a, c, g, or t
  misc_feature (548)..(548): n is a, c, g, or t
ctgccgccgctgccgcgtttgatcctttgcgatggcaggctttgagaacttaaacacggatttctaccagaccagttacagcatcgatgaccagtcacaacagtcctatgattacggaggaagtggaggaccctatagcaaacagtatgctggctatgactactcgcagcaaggccgatttgtccctccagagatgatgcagccacaacagccatacaccgggcagatttttcagccaactcaggcatacactccaacaacacctcagccattctatggaaacaattttgaagatgagccacccttattagaagaattaggtatcaattttgaccacatctggcaaaaaacactaacagtgttacatncgttnaaagtacagatggcagcatcatgaatgagactgatttggcaggaccaanggntttttgccttgcctttggagcccgttgttactggctggcaaaatccagtttggntntgtntttgggatcaggcaattggatgtctaggaaaggttngtttctaaattaaagagtatgacaggngtttcattttggtgtgggggaggggcctgggaattggtttttccatgaccca

SEQ ID NO: 214984 - DNA, 411 bp, Canis familiaris; identical to SEQ ID NO: 4877

SEQ ID NO: 214985 - DNA, 600 bp, Canis familiaris
  misc_feature (411)..(411): n is a, c, g, or t
  misc_feature (501)..(501): n is a, c, g, or t
  misc_feature (519)..(519): n is a, c, g, or t
  misc_feature (540)..(540): n is a, c, g, or t
  misc_feature (558)..(559): n is a, c, g, or t
  misc_feature (571)..(571): n is a, c, g, or t
cagcgtgcggggcgagccagcgagagggcgcgagcggcggcgctgcctgcagcctgcagcctcggccggccggcgagccagtgcgcgtgcgcggcggcggcctccgcggcgaccggggagcggacgcacggaccggcgagcgggcgagcgggcgagcggtgcgggcgcgaggcgaggccgagccacgagcgacatgggcgaccgagagcagctgctgcagcgggcgcggctggccgagcaggcggagcgctacgacgacatggcctccgccatgaaggcggtgacagagctcaatgaacctctttccaatgaagatcgaaacctcctctctgtggcctacaagaatgtggttggtgccaggcgatctttctggagggtcataacaagcattgagcagaaaaccatggctgntggaaacgaaaagaaattggagaaaagttaaagcttaccgggagaagattgagaaggaactggaaacagtgtgcaatgatgtcctggttntgttgacaagttctcatnaaaactgcaatgatttcagtntagagcaaggtatttttnntgaaatgaaagngattactaccgttcttgcaaagtagtttc

SEQ ID NO: 214986 - DNA, 521 bp, Canis familiaris; identical to SEQ ID NO: 4879
  misc_feature (445)..(445): n is a, c, g, or t
  misc_feature (515)..(515): n is a, c, g, or t
  misc_feature (518)..(518): n is a, c, g, or t

SEQ ID NO: 214987 - DNA, 640 bp, Canis familiaris; identical to SEQ ID NO: 4880
  misc_feature (374)..(374): n is a, c, g, or t
  misc_feature (386)..(386): n is a, c, g, or t
  misc_feature (458)..(458): n is a, c, g, or t
  misc_feature (469)..(469): n is a, c, g, or t
  misc_feature (509)..(509): n is a, c, g, or t
  misc_feature (541)..(541): n is a, c, g, or t
  misc_feature (562)..(562): n is a, c, g, or t
  misc_feature (609)..(609): n is a, c, g, or t
  misc_feature (619)..(619): n is a, c, g, or t
  misc_feature (626)..(626): n is a, c, g, or t
  misc_feature (634)..(634): n is a, c, g, or t

SEQ ID NO: 214988 - DNA, 600 bp, Canis familiaris
  misc_feature (418)..(418): n is a, c, g, or t
  misc_feature (481)..(481): n is a, c, g, or t
  misc_feature (501)..(501): n is a, c, g, or t
  misc_feature (509)..(509): n is a, c, g, or t
  misc_feature (562)..(562): n is a, c, g, or t
  misc_feature (570)..(570): n is a, c, g, or t
  misc_feature (577)..(577): n is a, c, g, or t
aaaagatatgttatgctattaatttgggaaaagaaatcattgaggttcagaaggcccacgacctggtttcagaatgctgacaatcgtttgtggaatgtcctctggatgccttgatactgagagatgggagggaaacagaaatggttgacaaccttcctacccatctacaaatgttattttaggtgctttgtggtaagtctttttcttagattgtactgttctgtgctcagaatgaaagttaatgaaaaaatgcattgttcactttattcaattgtcatctcttcagtttctagtacttttttaaaaatggtaaaagcctagatttataatttgataaacactaagtatttcctattaatataacctatttttgtattttacttaatgaactttaagtgcctgtcactctgaaaattgngtatttataatcaagcttgtctcacaggtgggcctaatacattaatttgtgcactcaagtgangagccctgctttaaggcctngcactacnaaactggagggctaggtttgatcatttttcagacctgccataaaaaactagcngatgaggnccccaanggtggttagttttcaatggaact

SEQ ID NO: 214989 - DNA, 518 bp, Canis familiaris; identical to SEQ ID NO: 4882

SEQ ID NO: 214990 - DNA, 600 bp, Canis familiaris
  misc_feature (406)..(406): n is a, c, g, or t
  misc_feature (409)..(409): n is a, c, g, or t
  misc_feature (441)..(441): n is a, c, g, or t
  misc_feature (532)..(532): n is a, c, g, or t
  misc_feature (578)..(580): n is a, c, g, or t
ggccttacaccttattaaagaagagaagcagggtattgtcagcatcttctcactcccttctccttgataacagctaccatgacaaccctgtggtttccaaggagcttagaatggagagaaattagctcatatgaaaaaaagactggcctaaggaacagcagttgttagttgctaatggtgtaaactgacccagccctctggtagacacaggatagataactctttggatagcatgtcttttttctgttaattagttgtatactctggcctctgtcatatcttcacaatggtgctcttttcatggggtattagccattcagttacagaagatgatttgaagatcttgatttgtttcagaatgatgcatatttcacatttttcaggttgggtatactttgtttggggntgnacccagaagggctaagagaaaggatctttggntatgattctctacaaaggaatatggacgttaacattgaaatacattaaaatggctagttcatacatctactaaatttttccaaatatttgnttttgaagaaacaaaatggtgaattgacctaatggaaaacctattnnntgactttttaagtagggggg

SEQ ID NO: 214991 - DNA, 391 bp, Canis familiaris; identical to SEQ ID NO: 4884
  misc_feature (69)..(69): n is a, c, g, or t
  misc_feature (110)..(110): n is a, c, g, or t
  misc_feature (169)..(169): n is a, c, g, or t
  misc_feature (171)..(171): n is a, c, g, or t
  misc_feature (247)..(247): n is a, c, g, or t
  misc_feature (251)..(251): n is a, c, g, or t
  misc_feature (296)..(296): n is a, c, g, or t
  misc_feature (305)..(305): n is a, c, g, or t
  misc_feature (331)..(331): n is a, c, g, or t

SEQ ID NO: 214992 - DNA, 600 bp, Canis familiaris
  misc_feature (402)..(402): n is a, c, g, or t
  misc_feature (413)..(413): n is a, c, g, or t
  misc_feature (419)..(419): n is a, c, g, or t
  misc_feature (435)..(435): n is a, c, g, or t
  misc_feature (445)..(445): n is a, c, g, or t
  misc_feature (528)..(528): n is a, c, g, or t
cggccccggggcggggggccggggcccggggaccccccacccagcgagacacacaagctggtggtcgtgggcggcggcggcgtgggcaagagcgcgctgaccatccagttcatccagtcctactttgtgtctgactacgatcccaccatcgaagactcctatacgaagatctgcacggtggatggtgtcccggcccggctcgacatcctggacaccgcaggccaggaggagttcggtgccatgcgggagcagtacatgcgcgctggccacggcttcctgctggtgtttgctattaatgaccggcagagtttcaacgaggtgggcaagcttttacgcagatccttcgagtcaaggaccgagacgatttccccatcgtgttggttgggaacaaggcttatctgnagacacagcgncaggtnccccgatctgaagctnttgcttttgnggcttccacacgtgggctaatttgagggctcagccaaactgcgcctaatgtggacgaggcctttaacaacttgtgcggctgtncggaagtaccaggaagaaggaagtttcggccaagccaccaatgccccaaggaagaaagacggaggttgtcct

SEQ ID NO: 214993 - DNA, 600 bp, Canis familiaris
  misc_feature (367)..(367): n is a, c, g, or t
  misc_feature (484)..(484): n is a, c, g, or t
  misc_feature (492)..(492): n is a, c, g, or t
  misc_feature (577)..(577): n is a, c, g, or t
cctaccagttctttcgggacgtctcagcggactttgagggccagagtcccaagtgtgcccagggtgtgcgggacgcattccagcagatccaggacttgtgctttcagggagcctgtgacgtggtcagccgggagtttggcacctgccagcccctgtccagccggaaggacctgacccagctctttgggtttgcccggaacgccttcactgtgctggccatgatggactacccataccccacccacttcattgcgcaccttcctgccaacccagtcaaggtcggctgtgaccggctgctgagtgagagccagagcatcaaggggctaagagcactggcaggtctggtgtacaactcctcgggcaccgngccctgctatgacatctaccttcagtacaagcctgtggaaacctacggctggggttaagcccaatgccaaagctggattacaaggctgaccgagataaactgactttcagaacaagngaagactnttccgagctgcattatgaccctccgcagaagactgctggaactggggggtggctcgaggatggttcaacactttggggagactanaggcagaaatctttttaagggac

SEQ ID NO: 214994 - DNA, 600 bp, Canis familiaris
  misc_feature (485)..(485): n is a, c, g, or t
  misc_feature (500)..(500): n is a, c, g, or t
  misc_feature (516)..(516): n is a, c, g, or t
  misc_feature (527)..(527): n is a, c, g, or t
gccgggctacccggaggcggatcaacaagcgaggagcgaagagctgcaacgctcatctgcggggtggtgtgagggcctccccctccaggcctcgcccctgccctcttccttttttctcttctggccactccggccctcctccttcccctcgcttcgcttgtactttggacacctttccctagatgtgacgtgtctcctgttcccttccggccctgcccgcctccctgtaccagagccgtgacctctcgaggccccacctccgctgagctcccggggccgggggagcaggggggcacccagggtggagtccgtgactgccaccctgaagtcaggccgtccaggggccgccacgggccgccacagctgcgatggcaagcccgggagaaggactggatggaggggccggctgggggggtggggcccgggagaggggacagggagggaatgtgtgccggggttaaaaaatgtttgacaagtggtgaagnctaaaagcttgttcntggacgggccaaaatncggatgcccanatccggcttaggatgggggaatggccacggatgggccccccaaaaccaagggcagggggtgtctggggttcct

SEQ ID NO: 214995 - DNA, 600 bp, Canis familiaris
  misc_feature (463)..(463): n is a, c, g, or t
  misc_feature (471)..(471): n is a, c, g, or t
  misc_feature (530)..(530): n is a, c, g, or t
  misc_feature (538)..(538): n is a, c, g, or t
  misc_feature (570)..(570): n is a, c, g, or t
  misc_feature (591)..(591): n is a, c, g, or t
ggaactggttctgggttcacctccctgctgatggaacgtctctctgtcgattatggcaagaagtccaagctagagttctccatctaccctgccccccaggtgtccacagctgtagtagagccctacaactccatcctcaccacccacaccaccctggagcactctgattgtgccttcatggtagacaatgaggccatctatgacatctgtcgtagaaacctcgatattgagcgcccaacctacactaacctcaaccgccttattagccagattgtgtcctccatcactgcttccctcagatttgatggagccctgaatgtggatctgacggagttccagaccaacctggtgccctatccccgcatccacttccctctggccacatatgcccctgtcatctctgctgagaaagcctaccatgaacagctttctgtagcagagatcaccaatgcatgctttgagncaagcaancagatggtggaaatgtgaccctcgccatggtaaaacatggcttgttgctggtgtaccgnggtgacgnggttccaaaaagtaaaggttgcattgcacatnaaaacaacgcagatcagttgnagactgggg

SEQ ID NO: 214996 - DNA, 442 bp, Canis familiaris; identical to SEQ ID NO: 4889
  misc_feature (430)..(430): n is a, c, g, or t

SEQ ID NO: 214997 - DNA, 600 bp, Canis familiaris
  misc_feature (143)..(143): n is a, c, g, or t
  misc_feature (218)..(218): n is a, c, g, or t
  misc_feature (222)..(222): n is a, c, g, or t
  misc_feature (308)..(308): n is a, c, g, or t
  misc_feature (366)..(366): n is a, c, g, or t
  misc_feature (448)..(448): n is a, c, g, or t
  misc_feature (473)..(473): n is a, c, g, or t
  misc_feature (475)..(475): n is a, c, g, or t
  misc_feature (503)..(503): n is a, c, g, or t
  misc_feature (557)..(557): n is a, c, g, or t
  misc_feature (576)..(576): n is a, c, g, or t
gttcctgggccttctccacagcagccgtggcgtccgatcgtgtctcaatccattctctggggcatatgacgcctgtcctgtcgccccagaacctgctgtcttgtgacacacacaaccagcagggctgccgtggtgggcgtctngacggtgcctggtggttcctgcgacggcgaggggtcgtgtctgaccactgctacccgttcgtgggccgtgagcangacnaggctggcccggcgccccgctgtatgatgcacagccgggccatgggtcggggcaagcgccaggccactgcccgatgccccagcagncatgtccatgccaatgacatctaccaggtcactcctgcctaccgcctcggcaccaacnagaaggagatcatgaaggagctgatggagaatggccctgtccaagctctcatggaggtgcacgaggacttcttctgtaccanggcggcatctacagccacacaccantnagccttgggaggcccgagcgatacccgnccgcattgggaccactcggtcaagaatcacaagggtgggggagaggagaccttnccgcatggaaggacgcttnaatactgggacgggggccaactcg

SEQ ID NO: 214998 - DNA, 600 bp, Canis familiaris
  misc_feature (503)..(503): n is a, c, g, or t
  misc_feature (545)..(545): n is a, c, g, or t
gagcgcaagacgaaactgtccaagaacctgctgcgcatgaagttcatgcaaagaggactggattcggagaccaggaaacaactagaagaggaagaaaagaaaatcattagtgaagagcactggtatttggatttgccagagcttaaagaaaaagaatgtttcataatagaagagcagagtttcttgttatgtgaagatcttctctatggaagaatgtcattcagaggatttaatcctgaggttgagaaattaatgcttcagatgaatgctaaaaacaaagtggaagaagttgaaagtgaagcagtggagcttgatgtgtcagatgaagaaatggccagaagatatgagaccttggtggggacaattggaaaaaagtttgccaagaagagagaccgtgctaattatgaagaagatgaaaatggacacataaaaccaacagttaaagtaaagaagatgtttttaaagccccaggattaaagtagatgctttaagacagagctcanggaagcctcgtaagagttacatattgtggactcatctgtggnctctggtagctattaatactatgatggttatttgtaaagaaatggataattttga

SEQ ID NO: 214999 - DNA, 390 bp, Canis familiaris; identical to SEQ ID NO: 4892
  misc_feature (180)..(180): n is a, c, g, or t
  misc_feature (251)..(251): n is a, c, g, or t
  misc_feature (311)..(311): n is a, c, g, or t
  misc_feature (313)..(313): n is a, c, g, or t
  misc_feature (340)..(340): n is a, c, g, or t
  misc_feature (349)..(349): n is a, c, g, or t

SEQ ID NO: 215000 - DNA, 581 bp, Canis familiaris; identical to SEQ ID NO: 4893
  misc_feature (436)..(436): n is a, c, g, or t
  misc_feature (439)..(439): n is a, c, g, or t
  misc_feature (462)..(462): n is a, c, g, or t
  misc_feature (465)..(465): n is a, c, g, or t
  misc_feature (471)..(471): n is a, c, g, or t
  misc_feature (534)..(534): n is a, c, g, or t
  misc_feature (538)..(538): n is a, c, g, or t
  misc_feature (541)..(541): n is a, c, g, or t
  misc_feature (559)..(559): n is a, c, g, or t
  misc_feature (571)..(571): n is a, c, g, or t

SEQ ID NO: 215001 - DNA, 600 bp, Canis familiaris
  misc_feature (380)..(380): n is a, c, g, or t
  misc_feature (505)..(505): n is a, c, g, or t
  misc_feature (520)..(520): n is a, c, g, or t
  misc_feature (588)..(588): n is a, c, g, or t
  misc_feature (590)..(590): n is a, c, g, or t
tggcttttaacagtggccaaagacttggtcagcctatttcttggttccttgatgctttaaaatttcagtagcaatgcattttaacctgctgaatacaactctggtgaataggtggcccattctcccgttaggagctgcttactctgctgtaaaagatggtttctcagaccatagcttaagtcagttcagttttcttccaagaaactgctctggagtaaaatgtccaggtttggtttctcctggacatatccgggcagccacagcagcactgcctcatgttctgcgtgcctgttgtggcaagatttctgttcctgcattatgatctcctcaggatatctgtgctcccttgttccacaactggccgtcccctccctcttctnctcccctcccccttctcccccttcccctctcctcagcccacaagctattgattccacataggctcaagtctgggaacatgggctgaaggctttggtgcactgcagcattttcttccagtagctgngaaggatgtactttntaacccaaggagaatttatcaagagcgtacatactagggtggatgtacctttggaccccacactaaananatcttgttaa

SEQ ID NO: 215002 - DNA, 600 bp, Canis familiaris
  misc_feature (442)..(442): n is a, c, g, or t
  misc_feature (473)..(473): n is a, c, g, or t
  misc_feature (503)..(503): n is a, c, g, or t
  misc_feature (528)..(528): n is a, c, g, or t
  misc_feature (542)..(542): n is a, c, g, or t
  misc_feature (565)..(565): n is a, c, g, or t
ctcgccagcaaccggagcctggcagaaggaaaccttctgtaccagccccaactggatgccctgaaagcacgtttgacccaaaaataccaggaactccaggttctcttcgaagcctatcagataaagaagaccaagttagataagcagtctagcagcgcttccttggagaccctgctggcacttcttcaggcagaaggggccaagattgaggaagacactgagaacatggctgagaagtttctcgatggagagcttcctctggattccttcatcgatgtctatcaaagccagcggaaactggcccacacacgaagagtgaaaatcgagaagctccaggagctggtgctaaaggggcagagactcccgcaggcctcggcgccagccccgctgctgccaaggtgcccgagccagcccctgcagcccccctgcctaccctactcanagccagtgggccccccttcgtgctactcggngcatcccccaccaccgccccgtgcctggangacgtttgggcacgctatttaccancggcatgggcttangaccaaccttcctacccaggatnaaagtgccttcttttgcccccgacgggcttgcccc

SEQ ID NO: 215003 - DNA, 589 bp, Canis familiaris; identical to SEQ ID NO: 4896
  misc_feature (345)..(345): n is a, c, g, or t
  misc_feature (383)..(383): n is a, c, g, or t
  misc_feature (447)..(447): n is a, c, g, or t
  misc_feature (464)..(464): n is a, c, g, or t
  misc_feature (513)..(513): n is a, c, g, or t
  misc_feature (525)..(525): n is a, c, g, or t
  misc_feature (533)..(533): n is a, c, g, or t
  misc_feature (545)..(545): n is a, c, g, or t
  misc_feature (557)..(557): n is a, c, g, or t

SEQ ID NO: 215004 - DNA, 600 bp, Canis familiaris
  misc_feature (487)..(487): n is a, c, g, or t
  misc_feature (503)..(503): n is a, c, g, or t
  misc_feature (528)..(528): n is a, c, g, or t
  misc_feature (533)..(533): n is a, c, g, or t
gctcctgcacatcccgggactggccagcaaggtcttctccgcgcagaaggccttcataaccctgacaaatgaaatgatccaggagcacaggaagacccgggaccccacccagccaccccgacacctgatcgacgccttcgtggatgagatagaaaaagacgtgtccagcaggagatagatgaggtgatagggcgggagcagctaccagagatgggagaccagacccgtatgcccttcaccgtggccgtgatccatgaggtgcagcgttttggggacatcgtcccactcggtgtgccccacatgacgtcccgagacactgaagtgcagggcttcctcatccccaaggggacgacactcatcaccaacctgtcgtcagtgctaaaggacgagaaggtctggaagaagcccttccgcttctaccccgagcactttctggacgcccagggccacttcgtcaaagcatgaggccttcatgcccttctctgangccgccgcgtctgctnggggagccctggccgcatggagctnttctntttttactgctctgcaggcttaactttttatgctggggcagcccgccaggacacgggtttacttcta

SEQ ID NO: 215005 - DNA, 309 bp, Canis familiaris; identical to SEQ ID NO: 4898

SEQ ID NO: 215006 - DNA, 600 bp, Canis familiaris
  misc_feature (402)..(402): n is a, c, g, or t
  misc_feature (409)..(409): n is a, c, g, or t
  misc_feature (419)..(419): n is a, c, g, or t
  misc_feature (468)..(468): n is a, c, g, or t
  misc_feature (521)..(521): n is a, c, g, or t
  misc_feature (545)..(545): n is a, c, g, or t
  misc_feature (551)..(551): n is a, c, g, or t
  misc_feature (595)..(595): n is a, c, g, or t
gggagagcacctgtagaaaggattgtcatcctaaagtagaatgtgcctcctctttggagtgtaaatgggaaggagaattttagcatgctcactgacctacctgcagctccagcgacagctaggatgtgtgttctccagccttcttcatgaggctgggtcaagttctttttaagtcagaacagcagattcagctctgacattctgatttgaatgatactgttcacgaatcagaatcctgtctattagactggacagcttgtggcaagctaatttgcctgtaataagccagaacttttttttattgatactgtaaatattgtgtgtgtgtgtgcgtgtgtgtgtgtgtatatatatatatacacatatatatatatttgtcaggtatctaagttaatttaaagntgtttgngcctttttgnttttaatgctttgatatttcaaatgttagcctcaattccgacaccatangtaggacgtaaagcttgctgataattcaagcatgaaatggatattcaaatggnaatctgctcaaaatgaaggccatnaaacanatggttggtgaaatgaggaaagatgccttgggagttgattgcantggaa

SEQ ID NO: 215007 - DNA, 404 bp, Canis familiaris; identical to SEQ ID NO: 4900
  misc_feature (383)..(383): n is a, c, g, or t

SEQ ID NO: 215008 - DNA, 600 bp, Canis familiaris
  misc_feature (456)..(456): n is a, c, g, or t
  misc_feature (498)..(499): n is a, c, g, or t
  misc_feature (532)..(532): n is a, c, g, or t
  misc_feature (555)..(555): n is a, c, g, or t
  misc_feature (560)..(560): n is a, c, g, or t
  misc_feature (591)..(591): n is a, c, g, or t
tcaaacaagcctatacacagtttggaggaaaacgtccctttggtgtttcattgctttacatcggctgggacaagcactatggctttcagctctatcagagtgaccctagtgggaattatggaggatggaaagccacgtgcatcggaaacaatagtgctgcagcggtgtcgatgttaaaacaagactacaaagaaggagaaatgactctgaagtccgcacttgctttagctatcaaagtcctaaacaagaccatggatgtgagtaaactctcggctgaaaaagtggagattgccaccctgacaagagagaacgggaagacggtcatcagggtcctgaagcagaaggaagtggagcagctgatcaagaaccacgaggaggaagaagcgaaagcggagccgagagaagaaagaaaaagagcagaaagagaaggagaaataggaggagaaccctgggctntggcggcttcgggggccggtgccccttgccgggcttccttgnnccggtggcaaactggggcggcaccagcgcaagnctgccgtttttgtccggtgagtnttgantgaccttcggcctaatggccccctcgccctncctggttgg

SEQ ID NO: 215009 - DNA, 600 bp, Canis familiaris
  misc_feature (441)..(441): n is a, c, g, or t
  misc_feature (477)..(477): n is a, c, g, or t
  misc_feature (495)..(495): n is a, c, g, or t
  misc_feature (562)..(562): n is a, c, g, or t
  misc_feature (592)..(592): n is a, c, g, or t
  misc_feature (597)..(597): n is a, c, g, or t
ccattttggcttcacttattgacttttctcaaaactctattaagcaaactattgacattcacattttattcaaaagaaaactgaaatgagagggggaataaaacttcagagtggataattataacactgaatttcaaaacctgttgtcttaagacctctataatgaattctatacttctcctctagggagtcacgttcaatttaaaattgcatatcaagttcaacaagcatatgactcctcttgatcatagcaattaaagaccaagaggttgttctttgtagaagaacaaaagtatagccacttattaatgaaatcaagtttttagattaagttgagcaattagatttcactaaaaaacaaaaacaaaagatgactcacgagaaatttgcactggctaactttgactttctttaacattaatggctaatagaatggaagangcaataaaacaatatttaaattgctggttggaaagncaaaatattaaattgctncatatccatgaataatcaatgggaaataattgcttttataccaaaaatgattggaaaattttaaaanttatcatcttagttcatggtcatctaactngggtnttt

SEQ ID NO: 215010 - DNA, 600 bp, Canis familiaris
  misc_feature (328)..(328): n is a, c, g, or t
  misc_feature (356)..(357): n is a, c, g, or t
  misc_feature (384)..(384): n is a, c, g, or t
  misc_feature (426)..(426): n is a, c, g, or t
  misc_feature (428)..(428): n is a, c, g, or t
  misc_feature (448)..(448): n is a, c, g, or t
  misc_feature (478)..(478): n is a, c, g, or t
  misc_feature (509)..(509): n is a, c, g, or t
  misc_feature (533)..(533): n is a, c, g, or t
ggccctcagcgtccggctccgggaggcctgcttccctcctggccccatcaggctacaggtcacagttgaagatgctgcgtcctctgcccacgtgtccctgcaagttcacccccattgcaccatcgcaactctccaggagcaggtgttctcggagtttggcttcccgccagctgtgcagcgctgggtcatcgggcagtgcctgtgtgtgcccgagcgcagccttgcttcgtatggggtccggcgggatggggatcctgctttcctctatctgctctaacgcccggagaggctcaggacgcaaccctctgggcccccggaaagacagatngggaactaaatcggctggtttcccaagnnactggggctggccaagaagggcttaanccagcaagcttcccaagcccctttaagctgggttggtcctgncnttctgcaaattaataaatgncccaagccacccggtttgagatgggcaganccaaagccctgaattgggacccctttttgangctcaaccacaaccgcaaagtttnaaaaagagaaggctgatcctcggcccaggtcctgggcttgctgaaatttaaggatttgtgattgtat

SEQ ID NO: 215011 - DNA, 388 bp, Canis familiaris; identical to SEQ ID NO: 4904

SEQ ID NO: 215012 - DNA, 520 bp, Canis familiaris; identical to SEQ ID NO: 4905
  misc_feature (305)..(305): n is a, c, g, or t
  misc_feature (496)..(496): n is a, c, g, or t

SEQ ID NO: 215013 - DNA, 398 bp, Canis familiaris; identical to SEQ ID NO: 4906

SEQ ID NO: 215014 - DNA, 399 bp, Canis familiaris; identical to SEQ ID NO: 4907

SEQ ID NO: 215015 - DNA, 529 bp, Canis familiaris; identical to SEQ ID NO: 4908
  misc_feature (366)..(366): n is a, c, g, or t
  misc_feature (389)..(389): n is a, c, g, or t
  misc_feature (425)..(425): n is a, c, g, or t
  misc_feature (431)..(431): n is a, c, g, or t
  misc_feature (479)..(479): n is a, c, g, or t
  misc_feature (487)..(487): n is a, c, g, or t
  misc_feature (522)..(522): n is a, c, g, or t

SEQ ID NO: 215016 - DNA, 407 bp, Canis familiaris; identical to SEQ ID NO: 4909
  misc_feature (21)..(21): n is a, c, g, or t
  misc_feature (30)..(30): n is a, c, g, or t
  misc_feature (93)..(93): n is a, c, g, or t
  misc_feature (151)..(151): n is a, c, g, or t
  misc_feature (253)..(253): n is a, c, g, or t
  misc_feature (316)..(316): n is a, c, g, or t
  misc_feature (319)..(319): n is a, c, g, or t
  misc_feature (370)..(370): n is a, c, g, or t
  misc_feature (380)..(380): n is a, c, g, or t
  misc_feature (392)..(392): n is a, c, g, or t

SEQ ID NO: 215017 - DNA, 474 bp, Canis familiaris; identical to SEQ ID NO: 4910
  misc_feature (352)..(352): n is a, c, g, or t
  misc_feature (370)..(370): n is a, c, g, or t
  misc_feature (403)..(403): n is a, c, g, or t
  misc_feature (424)..(424): n is a, c, g, or t
  misc_feature (446)..(446): n is a, c, g, or t
  misc_feature (450)..(450): n is a, c, g, or t

SEQ ID NO: 215018 - DNA, 517 bp, Canis familiaris; identical to SEQ ID NO: 4911
  misc_feature (353)..(353): n is a, c, g, or t
  misc_feature (371)..(371): n is a, c, g, or t
  misc_feature (394)..(394): n is a, c, g, or t
  misc_feature (453)..(453): n is a, c, g, or t
  misc_feature (507)..(507): n is a, c, g, or t

SEQ ID NO: 215019 - DNA, 163 bp, Canis familiaris; identical to SEQ ID NO: 4912
  misc_feature (32)..(32): n is a, c, g, or t
  misc_feature (35)..(35): n is a, c, g, or t
  misc_feature (117)..(117): n is a, c, g, or t
  misc_feature (149)..(149): n is a, c, g, or t

SEQ ID NO: 215020 - DNA, 592 bp, Canis familiaris; identical to SEQ ID NO: 4913
  misc_feature (81)..(81): n is a, c, g, or t
  misc_feature (97)..(97): n is a, c, g, or t
  misc_feature (101)..(101): n is a, c, g, or t
  misc_feature (130)..(130): n is a, c, g, or t
  misc_feature (147)..(147): n is a, c, g, or t
  misc_feature (300)..(300): n is a, c, g, or t
  misc_feature (356)..(356): n is a, c, g, or t
  misc_feature (392)..(392): n is a, c, g, or t
  misc_feature (432)..(432): n is a, c, g, or t
  misc_feature (463)..(463): n is a, c, g, or t
  misc_feature (474)..(474): n is a, c, g, or t
  misc_feature (483)..(483): n is a, c, g, or t
  misc_feature (495)..(495): n is a, c, g, or t
  misc_feature (520)..(520): n is a, c, g, or t
  misc_feature (551)..(551): n is a, c, g, or t

SEQ ID NO: 215021 - DNA, 411 bp, Canis familiaris; identical to SEQ ID NO: 4914
  misc_feature (402)..(402): n is a, c, g, or t

SEQ ID NO: 215022 - DNA, 265 bp, Canis familiaris; identical to SEQ ID NO: 4915
  misc_feature (67)..(67): n is a, c, g, or t
  misc_feature (206)..(206): n is a, c, g, or t

SEQ ID NO: 215023 - DNA, 546 bp, Canis familiaris; identical to SEQ ID NO: 4916
  misc_feature (375)..(375): n is a, c, g, or t
  misc_feature (391)..(391): n is a, c, g, or t
  misc_feature (411)..(411): n is a, c, g, or t
  misc_feature (473)..(473): n is a, c, g, or t
  misc_feature (492)..(492): n is a, c, g, or t
  misc_feature (502)..(502): n is a, c, g, or t
  misc_feature (516)..(516): n is a, c, g, or t

SEQ ID NO: 215024 - DNA, 455 bp, Canis familiaris; identical to SEQ ID NO: 4917
  misc_feature (385)..(385): n is a, c, g, or t
  misc_feature (394)..(394): n is a, c, g, or t

SEQ ID NO: 215025 - DNA, 525 bp, Canis familiaris; identical to SEQ ID NO: 4918
  misc_feature (331)..(331): n is a, c, g, or t
  misc_feature (406)..(406): n is a, c, g, or t
  misc_feature (421)..(421): n is a, c, g, or t
  misc_feature (425)..(425): n is a, c, g, or t
  misc_feature (440)..(440): n is a, c, g, or t
  misc_feature (450)..(450): n is a, c, g, or t
  misc_feature (462)..(462): n is a, c, g, or t
  misc_feature (485)..(485): n is a, c, g, or t
  misc_feature (498)..(499): n is a, c, g, or t

SEQ ID NO: 215026 - DNA, 541 bp, Canis familiaris; identical to SEQ ID NO: 4919
  misc_feature (23)..(23): n is a, c, g, or t
  misc_feature (85)..(85): n is a, c, g, or t
  misc_feature (210)..(210): n is a, c, g, or t
  misc_feature (254)..(254): n is a, c, g, or t
  misc_feature (283)..(283): n is a, c, g, or t
  misc_feature (300)..(300): n is a, c, g, or t
  misc_feature (319)..(319): n is a, c, g, or t
  misc_feature (393)..(393): n is a, c, g, or t
  misc_feature (412)..(412): n is a, c, g, or t
  misc_feature (420)..(420): n is a, c, g, or t
  misc_feature (496)..(496): n is a, c, g, or t
  misc_feature (516)..(516): n is a, c, g, or t
  misc_feature (527)..(527): n is a, c, g, or t

SEQ ID NO: 215027 - DNA, 378 bp, Canis familiaris; identical to SEQ ID NO: 4920
  misc_feature (191)..(191): n is a, c, g, or t
  misc_feature (242)..(242): n is a, c, g, or t
  misc_feature (282)..(282): n is a, c, g, or t
  misc_feature (290)..(290): n is a, c, g, or t
  misc_feature (341)..(341): n is a, c, g, or t
  misc_feature (359)..(359): n is a, c, g, or t

SEQ ID NO: 215028 - DNA, 243 bp, Canis familiaris; identical to SEQ ID NO: 4921
  misc_feature (60)..(60): n is a, c, g, or t
  misc_feature (63)..(63): n is a, c, g, or t
  misc_feature (69)..(69): n is a, c, g, or t
  misc_feature (114)..(114): n is a, c, g, or t
  misc_feature (125)..(125): n is a, c, g, or t
  misc_feature (131)..(131): n is a, c, g, or t
  misc_feature (163)..(163): n is a, c, g, or t
  misc_feature (178)..(178): n is a, c, g, or t
  misc_feature (193)..(193): n is a, c, g, or t
  misc_feature (207)..(207): n is a, c, g, or t

SEQ ID NO: 215029 - DNA, 389 bp, Canis familiaris; identical to SEQ ID NO: 4922
  misc_feature (218)..(218): n is a, c, g, or t
  misc_feature (249)..(249): n is a, c, g, or t
  misc_feature (284)..(284): n is a, c, g, or t
  misc_feature (290)..(290): n is a, c, g, or t
  misc_feature (342)..(342): n is a, c, g, or t
  misc_feature (373)..(373): n is a, c, g, or t

SEQ ID NO: 215030 - DNA, 600 bp, Canis familiaris
  misc_feature (245)..(245): n is a, c, g, or t
  misc_feature (356)..(356): n is a, c, g, or t
  misc_feature (414)..(414): n is a, c, g, or t
  misc_feature (430)..(430): n is a, c, g, or t
  misc_feature (434)..(434): n is a, c, g, or t
  misc_feature (537)..(537): n is a, c, g, or t
  misc_feature (540)..(540): n is a, c, g, or t
  misc_feature (557)..(557): n is a, c, g, or t
  misc_feature (597)..(597): n is a, c, g, or t
aatgtcagtcagttattcagttgaaaataagtaatgatttcatggttggttcctctactagatgtgaataaaaattgtgcctttagcacttggaaagtatttttacctggcaaagtaaaattgttgaaggagtgtctttgtttttagatagtaccatttgttggtgaaccatacttctattcatgtcagtggaaacttcattaagatgcacttaattatgttccaggttgtccataatataaaanagatctgcttttgtttttgtctatctaaaaatagagaactgtaaatgtaaagatataatcataatttaaatgattataaccttttagagatgcagcttgcattttcattgnctttttttaacatcatcatcattcttactaatgaaaattatttcagagcagccaggtnttcattaaataacagngagncacttcaaaactgaattattatataattatgcttgggattgaaaaaaaattaaccccaaatcccagtcccttcaagggaactttgaattacccgggtagaaanggnaaggtgggttgctttcntcaaattttgggatatgacatattacaggattacagaggnttt

SEQ ID NO: 215031 - DNA, 573 bp, Canis familiaris; identical to SEQ ID NO: 4924
  misc_feature (411)..(411): n is a, c, g, or t
  misc_feature (427)..(427): n is a, c, g, or t
  misc_feature (429)..(429): n is a, c, g, or t
  misc_feature (471)..(471): n is a, c, g, or t
  misc_feature (484)..(484): n is a, c, g, or t
  misc_feature (492)..(492): n is a, c, g, or t
  misc_feature (498)..(498): n is a, c, g, or t
  misc_feature (513)..(513): n is a, c, g, or t
  misc_feature (528)..(528): n is a, c, g, or t

SEQ ID NO: 215032 - DNA, 593 bp, Canis familiaris; identical to SEQ ID NO: 4925
  misc_feature (183)..(183): n is a, c, g, or t
  misc_feature (185)..(185): n is a, c, g, or t
  misc_feature (238)..(238): n is a, c, g, or t
  misc_feature (245)..(245): n is a, c, g, or t
  misc_feature (315)..(315): n is a, c, g, or t
  misc_feature (380)..(380): n is a, c, g, or t
  misc_feature (465)..(465): n is a, c, g, or t
  misc_feature (474)..(474): n is a, c, g, or t
  misc_feature (478)..(478): n is a, c, g, or t
  misc_feature (510)..(510): n is a, c, g, or t
  misc_feature (528)..(528): n is a, c, g, or t
  misc_feature (540)..(540): n is a, c, g, or t
  misc_feature (568)..(568): n is a, c, g, or t

SEQ ID NO: 215033 - DNA, 557 bp, Canis familiaris; identical to SEQ ID NO: 4926
  misc_feature (432)..(432): n is a, c, g, or t
  misc_feature (465)..(465): n is a, c, g, or t
  misc_feature (476)..(476): n is a, c, g, or t
  misc_feature (513)..(513): n is a, c, g, or t
  misc_feature (515)..(515): n is a, c, g, or t
  misc_feature (517)..(517): n is a, c, g, or t
  misc_feature (543)..(543): n is a, c, g, or t

SEQ ID NO: 215034 - DNA, 600 bp, Canis familiaris
  misc_feature (374)..(374): n is a, c, g, or t
  misc_feature (433)..(433): n is a, c, g, or t
  misc_feature (443)..(443): n is a, c, g, or t
  misc_feature (451)..(451): n is a, c, g, or t
  misc_feature (474)..(474): n is a, c, g, or t
  misc_feature (489)..(489): n is a, c, g, or t
  misc_feature (498)..(498): n is a, c, g, or t
  misc_feature (506)..(506): n is a, c, g, or t
  misc_feature (526)..(527): n is a, c, g, or t
  misc_feature (542)..(542): n is a, c, g, or t
  misc_feature (572)..(572): n is a, c, g, or t
  misc_feature (576)..(576): n is a, c, g, or t
  misc_feature (586)..(586): n is a, c, g, or t
tgtagcacaatttccacactgtgaaggcagtattagaagacttaattgtaaaagctctctcttgtcactgtgttacacttatgcattgccaaagttttgttagtcttgcatgcttaataaaagtgctgagactgttattaagtaataagctgtcaaacatttactgaaaatagaattggccccatggcttgatgtgaagacagcgaggaaagaagcaccagtcaagttgtgacaaagcccaaattaaagtgacctctaaatcttagtgaattgtctttttttgaggataaactagtcccttagggttagcaaacacttgttaataatgtctaaactttttttaaatgagtcatttaaattaaagtttaagttanggcatatttttcaagttaaacttaaattgcatttgaactatcaaaacaactcctttttntgaaaaaggncttgtagntaatttgaaataaatcagtatanacaaggatgtctggntactgaggntataaggnagtaatgagatgagaactanncctggcttcaatggnatataatcccggaggacatagggattcttntagngtacaaccgnggaagatgtaattg

SEQ ID NO: 215035 - DNA, 600 bp, Canis familiaris
  misc_feature (278)..(278): n is a, c, g, or t
  misc_feature (295)..(295): n is a, c, g, or t
  misc_feature (307)..(307): n is a, c, g, or t
  misc_feature (324)..(324): n is a, c, g, or t
  misc_feature (336)..(336): n is a, c, g, or t
  misc_feature (346)..(346): n is a, c, g, or t
  misc_feature (368)..(368): n is a, c, g, or t
  misc_feature (384)..(384): n is a, c, g, or t
  misc_feature (399)..(399): n is a, c, g, or t
  misc_feature (402)..(402): n is a, c, g, or t
  misc_feature (431)..(431): n is a, c, g, or t
  misc_feature (440)..(440): n is a, c, g, or t
  misc_feature (451)..(451): n is a, c, g, or t
  misc_feature (466)..(466): n is a, c, g, or t
  misc_feature (485)..(485): n is a, c, g, or t
  misc_feature (493)..(493): n is a, c, g, or t
  misc_feature (505)..(505): n is a, c, g, or t
  misc_feature (544)..(544): n is a, c, g, or t
  misc_feature (561)..(561): n is a, c, g, or t
  misc_feature (565)..(565): n is a, c, g, or t
  misc_feature (580)..(580): n is a, c, g, or t
cagctacctcctgataccctggagatgcgggtccgagatggcagcaaaatccgcaaccttctggggctggcactgggtcgattggagggtggtagtgcacggcatgtggtgttctcaggttctggccgggccgcagggaaggcggtgagctgtgctgagattgtcaagcgacgtgtaccaggcctgcaccagcttaccaagctgcgcttctgcagactgaagacagctgggtgccaatctcacctgacacgggcctggatcccctcacagtgcgccgncatgtacctgcaagtgngggtactgttanccgggaccccctaaaancccaaagaatgngggttaccanccttccaggaacaccccctggnctgggggcccaaaatngaagcttcaactttnggnccaccaacccccaaaaaagggttcgaganaacttggtncttgaaaaatntggggagcaaggttnttttcaggcatggactatnttaaaaangggtttaccttnttttgaaaaggcttttttaaattgtttaaaaatcccaanaagacctgaattttgcnaagnggggggcttcctttngggctttccgttttttttgg

SEQ ID NO: 215036 - DNA, 460 bp, Canis familiaris; identical to SEQ ID NO: 4929
  misc_feature (354)..(354): n is a, c, g, or t
  misc_feature (398)..(398): n is a, c, g, or t
  misc_feature (432)..(432): n is a, c, g, or t
  misc_feature (444)..(444): n is a, c, g, or t

SEQ ID NO: 215037 - DNA, 600 bp, Canis familiaris
  misc_feature (129)..(129): n is a, c, g, or t
  misc_feature (214)..(214): n is a, c, g, or t
  misc_feature (330)..(330): n is a, c, g, or t
  misc_feature (365)..(365): n is a, c, g, or t
  misc_feature (368)..(368): n is a, c, g, or t
  misc_feature (396)..(396): n is a, c, g, or t
  misc_feature (418)..(418): n is a, c, g, or t
  misc_feature (441)..(441): n is a, c, g, or t
  misc_feature (468)..(468): n is a, c, g, or t
  misc_feature (477)..(477): n is a, c, g, or t
  misc_feature (491)..(491): n is a, c, g, or t
  misc_feature (512)..(512): n is a, c, g, or t
  misc_feature (528)..(528): n is a, c, g, or t
  misc_feature (532)..(532): n is a, c, g, or t
  misc_feature (554)..(554): n is a, c, g, or t
  misc_feature (573)..(573): n is a, c, g, or t
  misc_feature (588)..(588): n is a, c, g, or t
acgtcccagtgggggcccctgaaccgtggctcccagttgcacagcacctgctgggtctcccaggaatcaggtgttgagggtgggcgacggatctctggcagttcaagcccaacaagcccacccactctntgcagagatggtggccacacagcagcagatgaacgacgcacagctggtgctccagcagcgagactactgtgcccactacctcatncggctgctcaagtgcaagcgtgacagcttccccaacatcctggcctgcaagcacgagcagcacgactgggactactgcgagcaccttgagtgagccccagacccgccccacattcncaagccctggcctggccccccgcaggatactgccncanaggcagaacacaatgaactagcaccgantttttccagccaagcttcaacnttggtttgaaaagaggaaatttnagggggccttgcttgggtggggccacntggcttttnaggccacctgaaangaatgggccaggcccggattntggtaggaaggcccancttntgcacttgggctcactggtgtncacttcgggcagaccccanaatttaaaccaggcncacaaggttttt

SEQ ID NO: 215038 - DNA, 336 bp, Canis familiaris; identical to SEQ ID NO: 4931
  misc_feature (308)..(308): n is a, c, g, or t
  misc_feature (312)..(312): n is a, c, g, or t
  misc_feature (314)..(314): n is a, c, g, or t

SEQ ID NO: 215039 - DNA, 310 bp, Canis familiaris; identical to SEQ ID NO: 4932
  misc_feature (80)..(80): n is a, c, g, or t
  misc_feature (85)..(85): n is a, c, g, or t
  misc_feature (108)..(108): n is a, c, g, or t
  misc_feature (126)..(126): n is a, c, g, or t
  misc_feature (133)..(133): n is a, c, g, or t
  misc_feature (135)..(135): n is a, c, g, or t
  misc_feature (152)..(152): n is a, c, g, or t
  misc_feature (172)..(172): n is a, c, g, or t
  misc_feature (179)..(180): n is a, c, g, or t
  misc_feature (204)..(204): n is a, c, g, or t
  misc_feature (223)..(223): n is a, c, g, or t
  misc_feature (228)..(228): n is a, c, g, or t
  misc_feature (260)..(260): n is a, c, g, or t
  misc_feature (265)..(265): n is a, c, g, or t

SEQ ID NO: 215040 - DNA, 522 bp, Canis familiaris; identical to SEQ ID NO: 4933
  misc_feature (358)..(358): n is a, c, g, or t
  misc_feature (405)..(405): n is a, c, g, or t
  misc_feature (412)..(412): n is a, c, g, or t
  misc_feature (437)..(437): n is a, c, g, or t
  misc_feature (447)..(447): n is a, c, g, or t
  misc_feature (460)..(460): n is a, c, g, or t
  misc_feature (472)..(472): n is a, c, g, or t
  misc_feature (494)..(494): n is a, c, g, or t
  misc_feature (497)..(497): n is a, c, g, or t
  misc_feature (507)..(507): n is a, c, g, or t

SEQ ID NO: 215041 - DNA, 600 bp, Canis familiaris
  misc_feature (343)..(343): n is a, c, g, or t
  misc_feature (350)..(350): n is a, c, g, or t
  misc_feature (362)..(362): n is a, c, g, or t
  misc_feature (376)..(376): n is a, c, g, or t
  misc_feature (383)..(383): n is a, c, g, or t
  misc_feature (411)..(411): n is a, c, g, or t
  misc_feature (443)..(443): n is a, c, g, or t
  misc_feature (464)..(464): n is a, c, g, or t
  misc_feature (484)..(484): n is a, c, g, or t
  misc_feature (502)..(502): n is a, c, g, or t
  misc_feature (523)..(523): n is a, c, g, or t
  misc_feature (536)..(536): n is a, c, g, or t
  misc_feature (561)..(561): n is a, c, g, or t
  misc_feature (571)..(571): n is a, c, g, or t
cctgatatttttagagggaaagatttttcattatggattcagtttttttaatgtttactagtcttattcagattttctatttcttcttgcatcattttcaattatttctatttttctaggaaaattgttcatttcaaatgtattgccatggtgttgtttatgttattcagtatccctacccttttctttcataataatctttaattgtgcctcctctttttctcatgatcagtcttattaaaggtttatttcctttgttaaagttttcaaagaactagtttttggtattattgatctttttctttttttatttctgcttttttcctctatttcttttggaggnttattgntattggtgaggnctttttaagcttcnttaggtngagggccttactatttaaaattcaagcnaggtatttttttggtcaattgcatttaaaagnttgtaaattttccctcttaanaaactgctttagcttcaatnttacaaggtttaaaaaangtaatatttttggtgggtggncaagttctaaaanttttacattttccctggcatttatnttaaaaatcncaaaatatttaggaccggcttttactttt

SEQ ID NO: 215042 - DNA, 447 bp, Canis familiaris; identical to SEQ ID NO: 4935

SEQ ID NO: 215043 - DNA, 600 bp, Canis familiaris
  misc_feature (365)..(365): n is a, c, g, or t
  misc_feature (376)..(376): n is a, c, g, or t
  misc_feature (403)..(403): n is a, c, g, or t
  misc_feature (405)..(405): n is a, c, g, or t
  misc_feature (463)..(463): n is a, c, g, or t
  misc_feature (492)..(492): n is a, c, g, or t
  misc_feature (517)..(517): n is a, c, g, or t
  misc_feature (519)..(519): n is a, c, g, or t
  misc_feature (546)..(546): n is a, c, g, or t
  misc_feature (570)..(570): n is a, c, g, or t
gcgccgacctgagcgcccgctccgcgcccccgaggacagcgccggccaccccgacgcccgcaccatgcaggccacggccgatttcaccaagatggactgtgtgtggagcaactggaaaagtcaggctattgacctgctctactggcgggacatcaagcagaccgggatcgtgttcgggagcttcctgctgctgctcttctccctgacccagttcagcgtcgtgagcgtcgtggcctacctggccctggccgcactctcggccaccatcagtttccgcatctacaagtctgttttacaagcagtgcagaaaaccgacgagggccaccctttcaagacctacttggagctcgagatcacgctttctnaggagcagatncagaaagtacacggactggcttggagntntatgtgaacaataaaactgaaaggaactgaggaggtttttccttgtccaagacctggnggattcttaaaaattgaaggccttgatgngggttcctgacttacgttggcgctntntttaatggctgaccctgttgttaaggnttgggggtttaaaggttactttanccgaagggatgtaagcaccagcacaaattg

SEQ ID NO: 215044 - DNA, 318 bp, Canis familiaris; identical to SEQ ID NO: 4937
  misc_feature (111)..(111): n is a, c, g, or t
  misc_feature (142)..(142): n is a, c, g, or t
  misc_feature (287)..(287): n is a, c, g, or t
  misc_feature (311)..(311): n is a, c, g, or t

SEQ ID NO: 215045 - DNA, 600 bp, Canis familiaris
  misc_feature (329)..(329): n is a, c, g, or t
  misc_feature (370)..(370): n is a, c, g, or t
  misc_feature (395)..(395): n is a, c, g, or t
  misc_feature (397)..(397): n is a, c, g, or t
  misc_feature (417)..(417): n is a, c, g, or t
  misc_feature (426)..(426): n is a, c, g, or t
  misc_feature (497)..(497): n is a, c, g, or t
  misc_feature (505)..(505): n is a, c, g, or t
  misc_feature (524)..(524): n is a, c, g, or t
  misc_feature (532)..(532): n is a, c, g, or t
  misc_feature (552)..(552): n is a, c, g, or t
  misc_feature (585)..(585): n is a, c, g, or t
  misc_feature (599)..(599): n is a, c, g, or t
cagcctgcacagccgcggaggccgcagcagcgagagttccagggtgtctcctcactgctgtagtaacctgggtccagggcctcggtggtgctcctgatgtccctcacccacccctgaagatcccaggtgggcgagggaatagtcagagggatcacaatctttcagctaatttattttactctgataatcggctgaatgtaacagaggaactaacgtctaacagcaagacgaggattctgaacgtccagaccaggctcacgggctccaaacacattaactggagagcggtgctgagcggcggctgcctctacatcgagatcccaggcggngccctgcggagggcaacaaggacagcttccaagtttttttngaggttcccggaggaggaagttgancnccgcccacgttttattttgntttcataanaaccgcgatgacagagccgccttgttcggacctttagatttttgggctttgagattgtgagaccgggcatncccttgtncccaaagaaccgaccttgntttatggnctaacgtttgagagagagtnttcggagaggaggagtaatggaaggccccttgnggcctttggttttnc

SEQ ID NO: 215046 - DNA, 424 bp, Canis familiaris; identical to SEQ ID NO: 4939
  misc_feature (232)..(232): n is a, c, g, or t
  misc_feature (393)..(393): n is a, c, g, or t
  misc_feature (395)..(395): n is a, c, g, or t
  misc_feature (407)..(407): n is a, c, g, or t

SEQ ID NO: 215047 - DNA, 473 bp, Canis familiaris; identical to SEQ ID NO: 4940
  misc_feature (343)..(343): n is a, c, g, or t
  misc_feature (354)..(354): n is a, c, g, or t
  misc_feature (432)..(432): n is a, c, g, or t
  misc_feature (457)..(457): n is a, c, g, or t
  misc_feature (466)..(466): n is a, c, g, or t

SEQ ID NO: 215048 - DNA, 518 bp, Canis familiaris; identical to SEQ ID NO: 4941
  misc_feature (44)..(44): n is a, c, g, or t
  misc_feature (174)..(174): n is a, c, g, or t
  misc_feature (419)..(419): n is a, c, g, or t
  misc_feature (450)..(450): n is a, c, g, or t
  misc_feature (468)..(468): n is a, c, g, or t
  misc_feature (471)..(471): n is a, c, g, or t

SEQ ID NO: 215049 - DNA, 382 bp, Canis familiaris; identical to SEQ ID NO: 4942

SEQ ID NO: 215050 - DNA, 600 bp, Canis familiaris
  misc_feature (364)..(364): n is a, c, g, or t
  misc_feature (368)..(368): n is a, c, g, or t
  misc_feature (396)..(396): n is a, c, g, or t
  misc_feature (409)..(409): n is a, c, g, or t
  misc_feature (421)..(421): n is a, c, g, or t
  misc_feature (448)..(448): n is a, c, g, or t
  misc_feature (484)..(485): n is a, c, g, or t
  misc_feature (489)..(489): n is a, c, g, or t
  misc_feature (555)..(555): n is a, c, g, or t
  misc_feature (580)..(580): n is a, c, g, or t
  misc_feature (590)..(590): n is a, c, g, or t
aactagaataggagaatactttaatgaatccttttgtttagttaatgtattctcctattctagttcctacataactaaacaaaaggattcattaaagtattgttggaaaaatagttacattaaggacttccggtgttttcaaggaacccgaaagcagtttggtttattgccatatttaaagtggacagagtaagtaatttacattttaaaccatttcatcccatctattgttaaataaaatatacgttccaaaaggggcatgaaacaagatgtatagttctgtgggatattacaaagcaatcatttgtatagatacccacccagttgaaggaagagaacattgttcgtacccacaaagcacctntctnctctctcctaactacttgccttgccttncaacaaaggaagncacaccatcttnattttgggaaaaaatcacttccttggntttcttttaaaatttaaaaaactaagggaactttgnnccanaattcgtttttcctgggttttttttttaacttgaatggaatcatcattggaattcgggatgggtgntcttactcaaattatgttgggaaanaggactcttntccaagttgt

SEQ ID NO: 215051 - DNA, 481 bp, Canis familiaris; identical to SEQ ID NO: 4944
  misc_feature (468)..(468): n is a, c, g, or t

SEQ ID NO: 215052 - DNA, 417 bp, Canis familiaris; identical to SEQ ID NO: 4945

SEQ ID NO: 215053 - DNA, 420 bp, Canis familiaris; identical to SEQ ID NO: 4946
  misc_feature (417)..(417): n is a, c, g, or t

SEQ ID NO: 215054 - DNA, 572 bp, Canis familiaris; identical to SEQ ID NO: 4947
  misc_feature (430)..(430): n is a, c, g, or t
  misc_feature (479)..(479): n is a, c, g, or t
  misc_feature (545)..(545): n is a, c, g, or t
  misc_feature (559)..(559): n is a, c, g, or t
  misc_feature (566)..(566): n is a, c, g, or t

SEQ ID NO: 215055 - DNA, 600 bp, Canis familiaris
  misc_feature (364)..(364): n is a, c, g, or t
  misc_feature (416)..(416): n is a, c, g, or t
  misc_feature (482)..(482): n is a, c, g, or t
  misc_feature (491)..(491): n is a, c, g, or t
  misc_feature (502)..(502): n is a, c, g, or t
  misc_feature (544)..(544): n is a, c, g, or t
  misc_feature (546)..(546): n is a, c, g, or t
  misc_feature (555)..(555): n is a, c, g, or t
  misc_feature (599)..(599): n is a, c, g, or t
tatgatttctatcctaaactgtattttgcctttgtattttttggatggaaattccacatatttttcccattaaaatttagccacaccaagctatctacaatatatacatataaagaacaacgagaagagtacacttaccaggatgagcactgagtaatgtatagaattgttgaatcactatattatacacctaaaactaatataacattagatgttcactagaattaaactgtaaaatttaattaaaaaaataacaatgagaagaaaacaggaatagataaaataaattgtccgttgcaggcaatccatacattttcttttaaaaaaaatatcactttggctttttcaggacaattcttctggngggggagtgggctggtaggccaaagataaaaggaaaggaaaggtaaaattgngggccatttataaaccgtaaagctgtagagagcaaaatgaacctgggttggctaccccgtccctgngtacctgcncacgttcagtnttagtaatgacccggaggcataggaaaggaaatctatttgangnttactgcangtgaggtagtttctacccaatcaacagttggaggggagctatgnt

SEQ ID NO: 215056 - DNA, 600 bp, Canis familiaris
  misc_feature (388)..(388): n is a, c, g, or t
  misc_feature (438)..(438): n is a, c, g, or t
  misc_feature (454)..(454): n is a, c, g, or t
  misc_feature (497)..(497): n is a, c, g, or t
  misc_feature (511)..(511): n is a, c, g, or t
  misc_feature (588)..(588): n is a, c, g, or t
  misc_feature (596)..(596): n is a, c, g, or t
ttacacgaagaaattgtggcatcaactgacactccaggtgcttgattttgtgcaggacccatgctttgcccaaggagatggcctcattaagctttatgaaaacttcatcagtgaatttgaacacagggtgaatcctctgtccctggtagaaattattcttcacgtagttagacagatgactgatcctaatgtggctcttacttttctggaaaagactcgcgaaaaggtgaaaagtagcgatgaggcagtgatcctgtgtaaaactgcaattggagctctaaaattaaacatcggggacctacaggttacaaaggaaacaattgaagatgtcgaagagatgctcaacaacctcctggtgtgacctcggttacaagcggttctatgactnttcagtaaatctatcaacaatcggaaaccatcattctatacaaaatgctnttgcggttctggctgngtcgtataaggatttgccagtgcttgacagaagagagagtttncgcttggctagcangacttttggcgaggcggtttaactttgagaactctatgcccccggctggatactgagagcaccgaccgcagggttgntgaacctnttgc

SEQ ID NO: 215057 - DNA, 313 bp, Canis familiaris; identical to SEQ ID NO: 4950
  misc_feature (210)..(210): n is a, c, g, or t

SEQ ID NO: 215058 - DNA, 539 bp, Canis familiaris; identical to SEQ ID NO: 4951
  misc_feature (143)..(143): n is a, c, g, or t
  misc_feature (158)..(158): n is a, c, g, or t
  misc_feature (227)..(227): n is a, c, g, or t
  misc_feature (240)..(240): n is a, c, g, or t
  misc_feature (251)..(251): n is a, c, g, or t
  misc_feature (254)..(254): n is a, c, g, or t
  misc_feature (280)..(280): n is a, c, g, or t
  misc_feature (328)..(328): n is a, c, g, or t
  misc_feature (346)..(346): n is a, c, g, or t
  misc_feature (403)..(403): n is a, c, g, or t
  misc_feature (405)..(405): n is a, c, g, or t
  misc_feature (434)..(434): n is a, c, g, or t
  misc_feature (451)..(451): n is a, c, g, or t
  misc_feature (462)..(462): n is a, c, g, or t
  misc_feature (495)..(495): n is a, c, g, or t
  misc_feature (510)..(510): n is a, c, g, or t
  misc_feature (523)..(523): n is a, c, g, or t
  misc_feature (529)..(529): n is a, c, g, or t
  misc_feature (538)..(538): n is a, c, g, or t

SEQ ID NO: 215059 - DNA, 415 bp, Canis familiaris; identical to SEQ ID NO: 4952
  misc_feature (32)..(32): n is a, c, g, or t
  misc_feature (62)..(62): n is a, c, g, or t
  misc_feature (156)..(156): n is a, c, g, or t
  misc_feature (180)..(180): n is a, c, g, or t
  misc_feature (187)..(187): n is a, c, g, or t
  misc_feature (191)..(191): n is a, c, g, or t
  misc_feature (214)..(214): n is a, c, g, or t
  misc_feature (223)..(223): n is a, c, g, or t
  misc_feature (229)..(229): n is a, c, g, or t
  misc_feature (242)..(242): n is a, c, g, or t
  misc_feature (250)..(250): n is a, c, g, or t
  misc_feature (254)..(254): n is a, c, g, or t
  misc_feature (281)..(281): n is a, c, g, or t
  misc_feature (301)..(301): n is a, c, g, or t
  misc_feature (346)..(346): n is a, c, g, or t
  misc_feature (354)..(354): n is a, c, g, or t
  misc_feature (375)..(375): n is a, c, g, or t
  misc_feature (414)..(414): n is a, c, g, or t

SEQ ID NO: 215060 - DNA, 653 bp, Canis familiaris; identical to SEQ ID NO: 4953
  misc_feature (290)..(290): n is a, c, g, or t
  misc_feature (466)..(466): n is a, c, g, or t
  misc_feature (508)..(508): n is a, c, g, or t
  misc_feature (549)..(549): n is a, c, g, or t
  misc_feature (584)..(584): n is a, c, g, or t
  misc_feature (594)..(594): n is a, c, g, or t
  misc_feature (628)..(628): n is a, c, g, or t
  misc_feature (636)..(636): n is a, c, g, or t

SEQ ID NO: 215061 - DNA, 518 bp, Canis familiaris; identical to SEQ ID NO: 4954
  misc_feature (447)..(447): n is a, c, g, or t
  misc_feature (457)..(457): n is a, c, g, or t
  misc_feature (468)..(468): n is a, c, g, or t
  misc_feature (478)..(478): n is a, c, g, or t

SEQ ID NO: 215062 - DNA, 391 bp, Canis familiaris; identical to SEQ ID NO: 4955
  misc_feature (21)..(21): n is a, c, g, or t
  misc_feature (57)..(57): n is a, c, g, or t
  misc_feature (108)..(108): n is a, c, g, or t
  misc_feature (117)..(117): n is a, c, g, or t
  misc_feature (185)..(185): n is a, c, g, or t
  misc_feature (187)..(187): n is a, c, g, or t
  misc_feature (205)..(205): n is a, c, g, or t
  misc_feature (217)..(217): n is a, c, g, or t
  misc_feature (300)..(300): n is a, c, g, or t
  misc_feature (345)..(345): n is a, c, g, or t
  misc_feature (353)..(353): n is a, c, g, or t

SEQ ID NO: 215063 - DNA, 600 bp, Canis familiaris
  misc_feature (402)..(402): n is a, c, g, or t
  misc_feature (417)..(417): n is a, c, g, or t
  misc_feature (419)..(419): n is a, c, g, or t
  misc_feature (433)..(433): n is a, c, g, or t
  misc_feature (532)..(532): n is a, c, g, or t
  misc_feature (546)..(546): n is a, c, g, or t
  misc_feature (573)..(573): n is a, c, g, or t
  misc_feature (575)..(575): n is a, c, g, or t
  misc_feature (581)..(581): n is a, c, g, or t
agaggatagattcctcaatcattttgcaaatactcgctggtttggtggtgtacctctcatttccttgggcaagaagactgtgaaacaaccagtatatgttgtagatgtatcaaaaggaattgttaatgcaattaaggatccagatgccaaagggaaatcttttgcctttgttgggcccaatcggtaccttctttttgacctggtgcaatatgtctttgctatggctcacagacccttcctgccgtaccctttgccacattttgcctatcggtgggtggcacgactcttcgaaatgagtccatttgaaccctggacaacaagggataaagtggagcggcttcacatcacagacatgatattgcctcacctgccaggcttggaagacctgggaattcaagcctnaccctggagcttaangncattgagggactgngggccaccgacttaccgttggttgttgtccgaaattgaaacgtgaagccggccaagactgcaacttttaacttgccctgtgatgccctggagttttggnggcaaacaagttgnctggctggtgactagcccacttttttnanggaatnctgttatagtgaataagaa

SEQ ID NO: 215064 - DNA, 475 bp, Canis familiaris; identical to SEQ ID NO: 4957
  misc_feature (363)..(363): n is a, c, g, or t
  misc_feature (388)..(388): n is a, c, g, or t
  misc_feature (414)..(414): n is a, c, g, or t
  misc_feature (428)..(428): n is a, c, g, or t
  misc_feature (438)..(438): n is a, c, g, or t
  misc_feature (440)..(440): n is a, c, g, or t
  misc_feature (454)..(454): n is a, c, g, or t

SEQ ID NO: 215065 - DNA, 159 bp, Canis familiaris; identical to SEQ ID NO: 4958

SEQ ID NO: 215066 - DNA, 423 bp, Canis familiaris; identical to SEQ ID NO: 4959
  misc_feature (246)..(246): n is a, c, g, or t
  misc_feature (253)..(253): n is a, c, g, or t
  misc_feature (277)..(277): n is a, c, g, or t
  misc_feature (322)..(322): n is a, c, g, or t
  misc_feature (328)..(328): n is a, c, g, or t
  misc_feature (363)..(363): n is a, c, g, or t
  misc_feature (377)..(378): n is a, c, g, or t
  misc_feature (397)..(397): n is a, c, g, or t

SEQ ID NO: 215067 - DNA, 491 bp, Canis familiaris; identical to SEQ ID NO: 4960
  misc_feature (198)..(198): n is a, c, g, or t
  misc_feature (212)..(212): n is a, c, g, or t
  misc_feature (234)..(234): n is a, c, g, or t
  misc_feature (313)..(313): n is a, c, g, or t
  misc_feature (368)..(368): n is a, c, g, or t
  misc_feature (417)..(417): n is a, c, g, or t
  misc_feature (421)..(421): n is a, c, g, or t
  misc_feature (426)..(426): n is a, c, g, or t
  misc_feature (455)..(455): n is a, c, g, or t
  misc_feature (460)..(460): n is a, c, g, or t
  misc_feature (466)..(466): n is a, c, g, or t
  misc_feature (483)..(483): n is a, c, g, or t

SEQ ID NO: 215068 - DNA, 219 bp, Canis familiaris; identical to SEQ ID NO: 4961
  misc_feature (67)..(67): n is a, c, g, or t
  misc_feature (91)..(91): n is a, c, g, or t
  misc_feature (117)..(117): n is a, c, g, or t
  misc_feature (133)..(133): n is a, c, g, or t
  misc_feature (142)..(142): n is a, c, g, or t
  misc_feature (152)..(152): n is a, c, g, or t
  misc_feature (171)..(171): n is a, c, g, or t
  misc_feature (192)..(192): n is a, c, g, or t

SEQ ID NO: 215069 - DNA, 509 bp, Canis familiaris; identical to SEQ ID NO: 4962
  misc_feature (426)..(426): n is a, c, g, or t
  misc_feature (436)..(436): n is a, c, g, or t
  misc_feature (474)..(474): n is a, c, g, or t

SEQ ID NO: 215070 - DNA, 552 bp, Canis familiaris; identical to SEQ ID NO: 4963
  misc_feature (440)..(440): n is a, c, g, or t
  misc_feature (480)..(480): n is a, c, g, or t
  misc_feature (483)..(483): n is a, c, g, or t
  misc_feature (485)..(485): n is a, c, g, or t
  misc_feature (527)..(527): n is a, c, g, or t

SEQ ID NO: 215071 - DNA, 522 bp, Canis familiaris; identical to SEQ ID NO: 4964
  misc_feature (161)..(161): n is a, c, g, or t
  misc_feature (250)..(250): n is a, c, g, or t
  misc_feature (446)..(446): n is a, c, g, or t
  misc_feature (450)..(450): n is a, c, g, or t
  misc_feature (481)..(481): n is a, c, g, or t
  misc_feature (494)..(494): n is a, c, g, or t
  misc_feature (505)..(505): n is a, c, g, or t

SEQ ID NO: 215072 - DNA, 352 bp, Canis familiaris; identical to SEQ ID NO: 4965
  misc_feature (295)..(295): n is a, c, g, or t
  misc_feature (297)..(297): n is a, c, g, or t
  misc_feature (324)..(324): n is a, c, g, or t
  misc_feature (331)..(331): n is a, c, g, or t
  misc_feature (349)..(349): n is a, c, g, or t

SEQ ID NO: 215073 - DNA, 600 bp, Canis familiaris
  misc_feature (428)..(428): n is a, c, g, or t
  misc_feature (455)..(455): n is a, c, g, or t
  misc_feature (481)..(481): n is a, c, g, or t
  misc_feature (491)..(491): n is a, c, g, or t
  misc_feature (508)..(508): n is a, c, g, or t
  misc_feature (527)..(527): n is a, c, g, or t
  misc_feature (529)..(529): n is a, c, g, or t
  misc_feature (594)..(594): n is a, c, g, or t
agggcctaatatgttttcaggaatggatgactttcaagagtatagtaaaccaggaaaaaaatggaaggttatgactcaggaattcattaatcagcacacagtggaacacaaaggaaaacaaatctgtaaatactttttggaaggaagatgtattaagggagatcagtgtaaatttgatcatgatgcagagttggagaagagaaaagagatctgcaaattttatttacaaggatattgtaccaaaggagagaactgcatttatatgcataatgaatttccgtgtaagttctatcatagtggagcaaaatgttaccaaggagacaactgtaaattttcacatgatgatctgactaaagaaacaaagaaacttttggacaaagtgttgaacacttgaagaagaagccataatgaagatgaacgagaattanaagacttagaaacgggcataactcctnttccaacaccttcaggagttgtcttntgccaccccncagagcattttcctttntgtcctgaagacgattttnancagatctttttgtgatttaagaaaatccatcttttttgaatagttggaaaccactggggtttacnataaat

SEQ ID NO: 215074 - DNA, 600 bp, Canis familiaris
  misc_feature (375)..(375): n is a, c, g, or t
  misc_feature (386)..(386): n is a, c, g, or t
  misc_feature (415)..(415): n is a, c, g, or t
  misc_feature (418)..(418): n is a, c, g, or t
  misc_feature (516)..(516): n is a, c, g, or t
  misc_feature (531)..(531): n is a, c, g, or t
  misc_feature (536)..(536): n is a, c, g, or t
  misc_feature (594)..(594): n is a, c, g, or t
  misc_feature (598)..(598): n is a, c, g, or t
cccaaagcaatgcacagactccgtgcagtctgtatggaaccacaaaagaccctgtatagccaaagcaatcttgagaaagaacaaagcatcgcactccctgatttcacactatatcacaaagagattgcaatttaaaaaacaaaacacatagatcaatgaaaccgagaacccagaataatcccacgtatatatggtcaattaatttatagcggaggagccaatatcagacagtggagaaatcagagtctctttaattaatagtgttgggaaaactgaagagccacatgcaaaagaatgaaactggagcagggtacttgggtggctcagtcagctaaacatcggactattgatcttcactcaggtcttgatctcaangtcatgagttnaagccccatgttgggctccaactgggtgnggngatactttttaaaaagtttacactaggccacttttttcaccatacacaaaaatcactcaaatggattaagacgaattaaagacctgaaacataccttnagaggaaacaaagcngaagntcttgcataagctggcttgaatttggttaacccaaagcaagcccaaggaaacaatggntctntc

SEQ ID NO: 215075 - DNA, 496 bp, Canis familiaris; identical to SEQ ID NO: 4968
  misc_feature (405)..(405): n is a, c, g, or t

SEQ ID NO: 215076 - DNA, 398 bp, Canis familiaris; identical to SEQ ID NO: 4969

SEQ ID NO: 215077 - DNA, 600 bp, Canis familiaris
  misc_feature (359)..(359): n is a, c, g, or t
  misc_feature (373)..(373): n is a, c, g, or t
  misc_feature (477)..(477): n is a, c, g, or t
  misc_feature (514)..(514): n is a, c, g, or t
  misc_feature (526)..(526): n is a, c, g, or t
  misc_feature (542)..(542): n is a, c, g, or t
  misc_feature (547)..(547): n is a, c, g, or t
  misc_feature (570)..(570): n is a, c, g, or t
  misc_feature (585)..(585): n is a, c, g, or t
gcaacagatgttagtatacattagtaaacattaatgttagtaaacattaaccaatgtttctctgaacatcatttcatcaaagggaaatttcaagttggagtgcttcctttgcttacattcatgtcctgtttttgttacttgtttcaagactgtaaggcatgggttcaaataagattggtctctttggttggagactatctctgggttcattcaatcagttgagaaacattgggcaccttcattaccaggcattatgctagatactgaggatatgaaggtaagattcctgtatttcctgccctcacagagcttatggtctcatatggtttcatacagtcttatgtggtcttagagaaggngatttaaactaggnataataaaagaaaatgccctggctctttcacttaaaataagaatcttgatgggttttcataagaaacttctagttctcaccatttgaactgcaaccactgaagngatttacagctctcatttttgctggaaggggttgttntggggacatttntagtttgggggactgnttttncctggtacaatgtctaaatgggngaagggcaaaacggntaaacattttaggag

SEQ ID NO: 215078 - DNA, 277 bp, Canis familiaris; identical to SEQ ID NO: 4971
  misc_feature (34)..(34): n is a, c, g, or t
  misc_feature (54)..(54): n is a, c, g, or t
  misc_feature (81)..(81): n is a, c, g, or t
  misc_feature (104)..(104): n is a, c, g, or t
  misc_feature (107)..(107): n is a, c, g, or t
  misc_feature (139)..(139): n is a, c, g, or t
  misc_feature (150)..(150): n is a, c, g, or t
  misc_feature (152)..(152): n is a, c, g, or t
  misc_feature (179)..(179): n is a, c, g, or t
  misc_feature (185)..(186): n is a, c, g, or t
  misc_feature (206)..(206): n is a, c, g, or t
  misc_feature (252)..(252): n is a, c, g, or t
  misc_feature (262)..(262): n is a, c, g, or t
  misc_feature (271)..(271): n is a, c, g, or t

SEQ ID NO: 215079 - DNA, 600 bp, Canis familiaris
  misc_feature (381)..(381): n is a, c, g, or t
  misc_feature (495)..(495): n is a, c, g, or t
  misc_feature (505)..(505): n is a, c, g, or t
  misc_feature (509)..(509): n is a, c, g, or t
  misc_feature (547)..(547): n is a, c, g, or t
  misc_feature (553)..(553): n is a, c, g, or t
  misc_feature (588)..(588): n is a, c, g, or t
gactctggtggtactttggctgttacttttgtttgcccacacttttcaccatcacctgctctttagtgactgcaaggaaaatccgcaaagctgagaaagcctgtacgcgagggaataaacgacagattcagctagaaagccagatgaactgtacagtagtggctctgaccattttatatggattttgcattattcctgaaaatatctgcaatattgttactgcctacatggcgacaggggtttctcagcagacaatggacctgctttatatcatcagccagttccttttgttctttaagtcctgtgttacccctgtcctccttttctgtctttgcaaacccttcagtcgggcttttatggaagtgctgttgctggtgctgngatgagtgcattcaaaaagtcttaacagtgaccagcgatgacaatgacaacgaatataccacagaacttgactttacctttaataccatacgccgggaaaggccacttttgttntgtggaactnatgntgaaagacagcctttgtggtacattactggtggatttnaatccnggaaggtttacttatattttcctctgggaaaaagncaaagagaaaaa

SEQ ID NO: 215080 - DNA, 580 bp, Canis familiaris; identical to SEQ ID NO: 4973
  misc_feature (450)..(450): n is a, c, g, or t
  misc_feature (567)..(567): n is a, c, g, or t

SEQ ID NO: 215081 - DNA, 600 bp, Canis familiaris
  misc_feature (408)..(408): n is a, c, g, or t
  misc_feature (441)..(441): n is a, c, g, or t
  misc_feature (443)..(443): n is a, c, g, or t
  misc_feature (483)..(483): n is a, c, g, or t
  misc_feature (497)..(497): n is a, c, g, or t
  misc_feature (529)..(529): n is a, c, g, or t
  misc_feature (544)..(544): n is a, c, g, or t
  misc_feature (552)..(552): n is a, c, g, or t
  misc_feature (554)..(554): n is a, c, g, or t
  misc_feature (572)..(572): n is a, c, g, or t
  misc_feature (591)..(591): n is a, c, g, or t
tttacgatgggtaccataggtggtggtatctttcaagcaatcaaaggttttcgcaattctccagtgggagtaaaccacagactacgagggagtttaacagctattaaaaccagggctccacagttgggaggtagctttgcagtttggggaggtttattttccatgattgactgcagtatggttcaagtcagagggaaagaagatccctggaactccatcacaagtggtgccttaacaggagccatactggcagcaagaaatggaccagtggctatggttgggtcagctgcgatgggtggcattctcctagctttaattgaaggagctggtatcttgttgacaagatttgcctctgcacaagtttcccaatggtcctcaatttgcttgaaaacccttttaagttgcttnaagcccagttaccatcttaccttttggggactntngcaattccaataggacttttttccaggatttttttaacanaatgagctgtgttnaaaaggaatttaaaaaataagttaaagtctgnttttaaaccataggngggacagntntagccaataggcttgaanaacacttactttttttttnttaaaaaac

SEQ ID NO: 215082 - DNA, 421 bp, Canis familiaris; identical to SEQ ID NO: 4975
  misc_feature (397)..(397): n is a, c, g, or t

SEQ ID NO: 215083 - DNA, 264 bp, Canis familiaris; identical to SEQ ID NO: 4976

SEQ ID NO: 215084 - DNA, 367 bp, Canis familiaris; identical to SEQ ID NO: 4977

SEQ ID NO: 215085 - DNA, 568 bp, Canis familiaris; identical to SEQ ID NO: 4978
  misc_feature (400)..(400): n is a, c, g, or t
  misc_feature (411)..(411): n is a, c, g, or t
  misc_feature (425)..(425): n is a, c, g, or t
  misc_feature (435)..(435): n is a, c, g, or t
  misc_feature (444)..(444): n is a, c, g, or t
  misc_feature (469)..(469): n is a, c, g, or t
  misc_feature (501)..(501): n is a, c, g, or t
  misc_feature (529)..(529): n is a, c, g, or t
  misc_feature (546)..(546): n is a, c, g, or t
  misc_feature (554)..(554): n is a, c, g, or t

SEQ ID NO: 215086 - DNA, 415 bp, Canis familiaris; identical to SEQ ID NO: 4979

SEQ ID NO: 215087 - DNA, 600 bp, Canis familiaris
  misc_feature (404)..(404): n is a, c, g, or t
  misc_feature (463)..(463): n is a, c, g, or t
  misc_feature (511)..(511): n is a, c, g, or t
  misc_feature (537)..(537): n is a, c, g, or t
  misc_feature (548)..(548): n is a, c, g, or t
  misc_feature (579)..(579): n is a, c, g, or t
  misc_feature (582)..(582): n is a, c, g, or t
  misc_feature (585)..(585): n is a, c, g, or t
ctggaccagtgggtcgagcagctcaacgagtgtaagcagctgaacgagaaccaggtgcggacgctgtgcgagaaggctaaggaaattttaacaaaagaatcaaatgtgcaagaggttcgttgtcctgtaaccgtatgcggagatgtgcatggtcaatttcatgatcttatggaactctttagaattggtggaaaatcaccagatacaaactatctgttcatgggcgactatgtagacagaggctattactcagtggagactgtgactcttcttgtggcattaaaggtgcgttatccagaacgcattacaatattgagaggaaaccatgaaagccgacaaattacccaagtatatggcttttacgatgaatgtctaccaaagtatggaaatgccaatggtttggnaatatttcacaaatctatttgattatcttcccttacaactttagtagatggacagaaanttttgcttcacgggggcctttttcattcatagatcactggatcatatnaaactttggatcgttacaagaagttncacatgaaggncccatgtgtgatcttgtgtggcagatccaangancgnggggggggggggttt

SEQ ID NO: 215088 - DNA, 477 bp, Canis familiaris; identical to SEQ ID NO: 4981
  misc_feature (134)..(134): n is a, c, g, or t
  misc_feature (327)..(327): n is a, c, g, or t
  misc_feature (441)..(441): n is a, c, g, or t
  misc_feature (469)..(469): n is a, c, g, or t

SEQ ID NO: 215089 - DNA, 554 bp, Canis familiaris; identical to SEQ ID NO: 4982
  misc_feature (409)..(409): n is a, c, g, or t
  misc_feature (419)..(419): n is a, c, g, or t
  misc_feature (429)..(429): n is a, c, g, or t
  misc_feature (449)..(449): n is a, c, g, or t
  misc_feature (481)..(481): n is a, c, g, or t
  misc_feature (486)..(486): n is a, c, g, or t
  misc_feature (509)..(509): n is a, c, g, or t
  misc_feature (512)..(512): n is a, c, g, or t

SEQ ID NO: 215090 - DNA, 600 bp, Canis familiaris
  misc_feature (500)..(500): n is a, c, g, or t
  misc_feature (504)..(504): n is a, c, g, or t
  misc_feature (506)..(506): n is a, c, g, or t
  misc_feature (540)..(540): n is a, c, g, or t
  misc_feature (550)..(550): n is a, c, g, or t
  misc_feature (552)..(552): n is a, c, g, or t
  misc_feature (582)..(582): n is a, c, g, or t
  misc_feature (591)..(591): n is a, c, g, or t
atatttccagcatatgtagcgttaataggcctgtcctggtaactgtgtgtttgggatttcatttttggttccaccaaattaggaaaagaaatggctcagttgtgtatgactagttagagatttttggagccaaacacctgctgtttcgtagatacctagtacagagtctaaacttgtcatttgtttttcctcacagagtaaccacccattcattgctgtcttcccaacttccaatgatctttcaataactttcttgcctctagaatcatccgttccaagtatgcatacatgcctagcacatagtaggtgctcaaatattaatttccttcttacctccttatcatgtatctttccatttccaatatggattccaacccaatagtaaatgacattacatgtaatgaaacaccgattgggctaaattggatcttacctggataaagcaattttgattttatataagcttggtggatatgaaaaaaaaacagggagaaaaattntttntngaatattttaagttaggaagagagaaggcaatgngtacattgtnangtactttgctgaaaaaatgtttggtgattntttcttaanaacctaaaa

SEQ ID NO: 215091 - DNA, 512 bp, Canis familiaris; identical to SEQ ID NO: 4984
  misc_feature (292)..(292): n is a, c, g, or t
  misc_feature (389)..(389): n is a, c, g, or t
  misc_feature (394)..(394): n is a, c, g, or t
  misc_feature (417)..(417): n is a, c, g, or t
  misc_feature (429)..(429): n is a, c, g, or t
  misc_feature (474)..(474): n is a, c, g, or t
  misc_feature (484)..(484): n is a, c, g, or t
  misc_feature (498)..(498): n is a, c, g, or t

SEQ ID NO: 215092 - DNA, 600 bp, Canis familiaris
  misc_feature (442)..(442): n is a, c, g, or t
  misc_feature (479)..(479): n is a, c, g, or t
  misc_feature (502)..(502): n is a, c, g, or t
  misc_feature (506)..(506): n is a, c, g, or t
  misc_feature (538)..(538): n is a, c, g, or t
  misc_feature (577)..(577): n is a, c, g, or t
aatttttaaaaaaagacccattgataaattccttacacaagatggactttagacccaaagacccctcagtttcaaagtgagaggatggagatccatttatcatttaaatgaacattaaaagaaagctggagtagccatacttatattagacaaacaagattttaaaccaaagactgtaataagagatgaaaaataacactgtatcataatacaagcatcttatccaacaagatctaacaattgtaaatattgatgcccctgaacttcatgacaaatacataaagcaattggtaacaaacttaaagaaattcattgataataatacaatgacagtaggggattttaacaccccactcacagcaatggacagattatctaagcagaaaatcaacaaggaaacaagggctttgaatgaccactgggccagatgactttacatatntttagaacatttatacttaaagcactgatacacattnttttaagtttgcatagaacattntcanactagacggtactaggcacaaataagcctcanccatataagaggatgggacatacctgctttttttagacncacctttgacttggaataataca

SEQ ID NO: 215093 - DNA, 208 bp, Canis familiaris; identical to SEQ ID NO: 4986
  misc_feature (182)..(183): n is a, c, g, or t
  misc_feature (188)..(188): n is a, c, g, or t

SEQ ID NO: 215094 - DNA, 694 bp, Canis familiaris; identical to SEQ ID NO: 4987
  misc_feature (457)..(457): n is a, c, g, or t
  misc_feature (461)..(461): n is a, c, g, or t
  misc_feature (480)..(480): n is a, c, g, or t
  misc_feature (521)..(521): n is a, c, g, or t
  misc_feature (534)..(534): n is a, c, g, or t
  misc_feature (589)..(590): n is a, c, g, or t
  misc_feature (624)..(624): n is a, c, g, or t
  misc_feature (634)..(634): n is a, c, g, or t
  misc_feature (645)..(645): n is a, c, g, or t
  misc_feature (661)..(661): n is a, c, g, or t
  misc_feature (665)..(665): n is a, c, g, or t
  misc_feature (670)..(670): n is a, c, g, or t
  misc_feature (688)..(688): n is a, c, g, or t

SEQ ID NO: 215095 - DNA, 592 bp, Canis familiaris; identical to SEQ ID NO: 4988
  misc_feature (414)..(414): n is a, c, g, or t
  misc_feature (428)..(428): n is a, c, g, or t
  misc_feature (437)..(437): n is a, c, g, or t
  misc_feature (454)..(454): n is a, c, g, or t
  misc_feature (480)..(480): n is a, c, g, or t
  misc_feature (502)..(502): n is a, c, g, or t
  misc_feature (535)..(535): n is a, c, g, or t
  misc_feature (540)..(540): n is a, c, g, or t
  misc_feature (557)..(557): n is a, c, g, or t
  misc_feature (572)..(572): n is a, c, g, or t
  misc_feature (583)..(583): n is a, c, g, or t

SEQ ID NO: 215096 - DNA, 441 bp, Canis familiaris; identical to SEQ ID NO: 4989
  misc_feature (408)..(408): n is a, c, g, or t

SEQ ID NO: 215097 - DNA, 340 bp, Canis familiaris; identical to SEQ ID NO: 4990

SEQ ID NO: 215098 - DNA, 600 bp, Canis familiaris
  misc_feature (368)..(368): n is a, c, g, or t
  misc_feature (371)..(371): n is a, c, g, or t
  misc_feature (375)..(375): n is a, c, g, or t
  misc_feature (421)..(421): n is a, c, g, or t
  misc_feature (497)..(497): n is a, c, g, or t
  misc_feature (537)..(537): n is a, c, g, or t
  misc_feature (552)..(552): n is a, c, g, or t
  misc_feature (556)..(556): n is a, c, g, or t
actaaaaaagaaagttcttaaatcaatgacctaagcatccactttaagaaactggaaaagtaagagcaaatgaaattcaaagtaagcagaagaaagaaacaataaaggatcaagcaataaaccgaaaagagaggaaaaaatagagaagattaataaagccaaaaccagttctctgaaaaggtaaataaaactgataaacttctagtcaagtttatcaaacaaaaaaatatgatatgatatatttccttatgatagataaggactattggggatattgggaatgagaaagatgacatcactacagattctcaaatatcaaaggactaataactggcggggaatttccacccattaggatcctgggtggnttnaatnggagagcatccaccccttttttttaaattcttttattattaagaanagccataaaaagagagggggagagagaggcaaaacccaggccgagggagaacaggcttcatgcccaggagcccganggggatcgaccctggctttaggatcggccctgggccaagnaggccccaaccctgngccncccaggatcctttttttttttactacactttggtctcaaattga

SEQ ID NO: 215099 - DNA, 600 bp, Canis familiaris
  misc_feature (51)..(51): n is a, c, g, or t
  misc_feature (399)..(399): n is a, c, g, or t
  misc_feature (459)..(459): n is a, c, g, or t
  misc_feature (507)..(507): n is a, c, g, or t
  misc_feature (523)..(523): n is a, c, g, or t
  misc_feature (552)..(552): n is a, c, g, or t
  misc_feature (557)..(557): n is a, c, g, or t
  misc_feature (595)..(595): n is a, c, g, or t
  misc_feature (598)..(598): n is a, c, g, or t
ggcagggacaattattaaattagaatcctttgtttaagaaaaaaaaaaagngaatctctgtctctctccctctctttctcttctgtctcactttctttgaggctttttaaaaaattagataaaaatctgtttatttaagatggctacagatgttcttatgtcaaggtggaataacagattacggaatcttccaaaagacgttttgatcctctaactacgtaatgaaaatcttcaaaactgagtcattcggatgaggccaaggtctaatttaggcatttaccccttggtccctaatggaggagaatcaaaaggggaaaaagcccccaaatgcagagctcactaaaagatctatggcaaacccagcaggattaaacaggaaacaaatctcatattcttaanaagatgatggacatgtattttaatatcttaaattgaaagggggtggggcatttttttttntggtatcccttcactgcttaggggaggggattcgggtttaaagagacntattaaaaacaaagtngagggttttgttgggcgtctttttcatgnggggnccttacatggccctgtgaaaagcctgtcaaacctttanggntt

SEQ ID NO: 215100 - DNA, 600 bp, Canis familiaris
  misc_feature (411)..(411): n is a, c, g, or t
  misc_feature (417)..(417): n is a, c, g, or t
  misc_feature (419)..(419): n is a, c, g, or t
  misc_feature (442)..(442): n is a, c, g, or t
  misc_feature (489)..(490): n is a, c, g, or t
  misc_feature (510)..(510): n is a, c, g, or t
  misc_feature (571)..(571): n is a, c, g, or t
gggtgagagagaaggaaacagaacttaaaatggataaagtaagatatgttaaaaatgtccctgttttgtcctgaaattttagtccattctggataaataggattttctagttcagatatgagaagttgtagctctgatatctagctttagccttggtctgctgattgcgttgttttgatttgcttttctggaaaagcatttttgctagcagccatacagacttcctccttcatacctagcagtactttatatcgtaaaactttgtgccatgcagcatttgaagactcagtttttaaaattgttagcctgttgctgactttattgtgttaattcctatttcaacagctatttcccttaattcaggatacaacttcttgtgtatgacagctttccttcacacaccatttttgngggtgngnatatatctgcttggggaggaatnggaaaaaacacaactttttaatttgtttaaaaaaacctttgcctgtnncatttgggctcttaccaatnaagaaccggggcattttaatttatatggggatggttccactagaaatctccatgatttgtngggcccttataactgcattttaaaatttt

SEQ ID NO: 215101 - DNA, 563 bp, Canis familiaris; identical to SEQ ID NO: 4994
  misc_feature (222)..(222): n is a, c, g, or t
  misc_feature (246)..(246): n is a, c, g, or t
  misc_feature (330)..(330): n is a, c, g, or t
  misc_feature (402)..(402): n is a, c, g, or t
  misc_feature (460)..(460): n is a, c, g, or t
  misc_feature (484)..(484): n is a, c, g, or t
  misc_feature (491)..(491): n is a, c, g, or t
  misc_feature (497)..(497): n is a, c, g, or t
  misc_feature (529)..(529): n is a, c, g, or t
  misc_feature (533)..(533): n is a, c, g, or t
  misc_feature (556)..(556): n is a, c, g, or t

SEQ ID NO: 215102 - DNA, 596 bp, Canis familiaris; identical to SEQ ID NO: 4995
  misc_feature (328)..(328): n is a, c, g, or t
  misc_feature (369)..(369): n is a, c, g, or t
  misc_feature (383)..(383): n is a, c, g, or t
  misc_feature (398)..(398): n is a, c, g, or t
  misc_feature (441)..(441): n is a, c, g, or t
  misc_feature (446)..(446): n is a, c, g, or t
  misc_feature (467)..(467): n is a, c, g, or t
  misc_feature (485)..(485): n is a, c, g, or t
  misc_feature (491)..(491): n is a, c, g, or t
  misc_feature (535)..(535): n is a, c, g, or t
  misc_feature (553)..(553): n is a, c, g, or t

SEQ ID NO: 215103 - DNA, 600 bp, Canis familiaris
  misc_feature (429)..(429): n is a, c, g, or t
  misc_feature (442)..(442): n is a, c, g, or t
  misc_feature (511)..(511): n is a, c, g, or t
  misc_feature (514)..(514): n is a, c, g, or t
  misc_feature (517)..(517): n is a, c, g, or t
  misc_feature (547)..(547): n is a, c, g, or t
  misc_feature (572)..(572): n is a, c, g, or t
ttttttacaaaggtgccaatgtatttaaaaaggaaaaggataatcttttcaacaaatggtattgaaataactataaaaaacatgaaaacaaaatcaaaaccttctctcctacttaaaagtctacagaaaaattaaatgtaactggtgaaatgaaaacaaatctaggagagaatctttgtaatccaggttagagaaatattttttttttcagataggacatgaaaagcaataatttaaaagaaaaagagaaattggacttcatcaaaataaaaactttttgttcatcaaaaacttccattaagtgaagaagcaagccacagattggaataaaatattcaaagtacccatatctgacaaaggattcttacccagaatatatgaagaactcctgtaaatcagtaataaaagaagccaggttaagaaacttcncagaaaaaaaatntccaaaggtaaatttttaaggtaacatcacttatcatcaaggaatgcccattaaaaccctaccaggatnccnctnaatgactaaaattccaaatatcccatcggntaaatgggtaaactgaaaaaactgncatatgggatatgtcagcatatgggatg

SEQ ID NO: 215104 - DNA, 447 bp, Canis familiaris; identical to SEQ ID NO: 4997
  misc_feature (420)..(420): n is a, c, g, or t
  misc_feature (424)..(424): n is a, c, g, or t
  misc_feature (428)..(428): n is a, c, g, or t

SEQ ID NO: 215105 - DNA, 483 bp, Canis familiaris; identical to SEQ ID NO: 4998
  misc_feature (25)..(25): n is a, c, g, or t
  misc_feature (457)..(457): n is a, c, g, or t
  misc_feature (468)..(468): n is a, c, g, or t

SEQ ID NO: 215106 - DNA, 498 bp, Canis familiaris; identical to SEQ ID NO: 4999
  misc_feature (290)..(290): n is a, c, g, or t
  misc_feature (317)..(317): n is a, c, g, or t
  misc_feature (326)..(326): n is a, c, g, or t
  misc_feature (371)..(371): n is a, c, g, or t
  misc_feature (398)..(398): n is a, c, g, or t
  misc_feature (408)..(408): n is a, c, g, or t
  misc_feature (427)..(427): n is a, c, g, or t
  misc_feature (450)..(450): n is a, c, g, or t
  misc_feature (457)..(457): n is a, c, g, or t
  misc_feature (467)..(467): n is a, c, g, or t
  misc_feature (480)..(480): n is a, c, g, or t
  misc_feature (490)..(490): n is a, c, g, or t

SEQ ID NO: 215107 - DNA, 482 bp, Canis familiaris; identical to SEQ ID NO: 5000
  misc_feature (253)..(253): n is a, c, g, or t
  misc_feature (420)..(421): n is a, c, g, or t
  misc_feature (427)..(427): n is a, c, g, or t
  misc_feature (447)..(448): n is a, c, g, or t
  misc_feature (468)..(468): n is a, c, g, or t
  misc_feature (474)..(474): n is a, c, g, or t

SEQ ID NO: 215108 - DNA, 593 bp, Canis familiaris; identical to SEQ ID NO: 5001
  misc_feature (424)..(424): n is a, c, g, or t
  misc_feature (469)..(471): n is a, c, g, or t
  misc_feature (485)..(485): n is a, c, g, or t
  misc_feature (517)..(518): n is a, c, g, or t
  misc_feature (569)..(569): n is a, c, g, or t
  misc_feature (572)..(572): n is a, c, g, or t

SEQ ID NO: 215109 - DNA, 545 bp, Canis familiaris; identical to SEQ ID NO: 5002
  misc_feature (427)..(427): n is a, c, g, or t
  misc_feature (476)..(476): n is a, c, g, or t
  misc_feature (507)..(507): n is a, c, g, or t
  misc_feature (525)..(525): n is a, c, g, or t
  misc_feature (530)..(530): n is a, c, g, or t
  misc_feature (540)..(540): n is a, c, g, or t

SEQ ID NO: 215110 - DNA, 600 bp, Canis familiaris
  misc_feature (338)..(338): n is a, c, g, or t
  misc_feature (390)..(390): n is a, c, g, or t
  misc_feature (398)..(398): n is a, c, g, or t
  misc_feature (413)..(413): n is a, c, g, or t
  misc_feature (424)..(424): n is a, c, g, or t
  misc_feature (479)..(479): n is a, c, g, or t
  misc_feature (502)..(502): n is a, c, g, or t
  misc_feature (514)..(514): n is a, c, g, or t
  misc_feature (518)..(518): n is a, c, g, or t
  misc_feature (527)..(527): n is a, c, g, or t
  misc_feature (574)..(574): n is a, c, g, or t
  misc_feature (577)..(577): n is a, c, g, or t
  misc_feature (589)..(589): n is a, c, g, or t
ccgactggcctagtcctccaaaataagaagttggctttggcttagttaattgtatagctgttaccagaatctacactgtaggaaaacaattaggcatataagcgtgatgtgggtgagttgtttatttatttaaaaaaggtgaatgagtttggcccagattgtcttcattttcagtttgggtttaatggtgtagaaataaataaactgtgactaataaaaaagaacatttggttagtcagatccatttttaacctctggtgctgtactaaagtggaattaaacttgatgtaaattaaatgtttggctcatttgagcattttagacaatatgagaatgtntaataaattattaaatcaaaaaattggtagaacttaatatttttgaagttgnaagggacnttaaaggaaagcccnttatttaagcngggggacccacttttataagccctggtggggattacttgaacatttaatatttgnccggttatttgggtatagtaagnagggtcacatgntttngggtttggnaccattttgaattttttgttttaaagcctaggctaaaggggtttatnatnttttttaatttngcctggactta

SEQ ID NO: 215111 - DNA, 499 bp, Canis familiaris; identical to SEQ ID NO: 5004
  misc_feature (419)..(419): n is a, c, g, or t
  misc_feature (454)..(454): n is a, c, g, or t
  misc_feature (457)..(457): n is a, c, g, or t
  misc_feature (477)..(477): n is a, c, g, or t
  misc_feature (487)..(487): n is a, c, g, or t

SEQ ID NO: 215112 - DNA, 186 bp, Canis familiaris; identical to SEQ ID NO: 5005
  misc_feature (16)..(16): n is a, c, g, or t
  misc_feature (38)..(38): n is a, c, g, or t
  misc_feature (49)..(50): n is a, c, g, or t
  misc_feature (116)..(116): n is a, c, g, or t
  misc_feature (142)..(142): n is a, c, g, or t
  misc_feature (162)..(162): n is a, c, g, or t

SEQ ID NO: 215113 - DNA, 550 bp, Canis familiaris; identical to SEQ ID NO: 5006
  misc_feature (436)..(436): n is a, c, g, or t
  misc_feature (446)..(446): n is a, c, g, or t
  misc_feature (493)..(493): n is a, c, g, or t
  misc_feature (508)..(508): n is a, c, g, or t
  misc_feature (525)..(525): n is a, c, g, or t
  misc_feature (531)..(531): n is a, c, g, or t
  misc_feature (547)..(547): n is a, c, g, or t

SEQ ID NO: 215114 - DNA, 506 bp, Canis familiaris; identical to SEQ ID NO: 5007
  misc_feature (390)..(390): n is a, c, g, or t
  misc_feature (413)..(413): n is a, c, g, or t
  misc_feature (443)..(443): n is a, c, g, or t
  misc_feature (460)..(461): n is a, c, g, or t

SEQ ID NO: 215115 - DNA, 397 bp, Canis familiaris; identical to SEQ ID NO: 5008
  misc_feature (377)..(377): n is a, c, g, or t

SEQ ID NO: 215116 - DNA, 600 bp, Canis familiaris
  misc_feature (265)..(265): n is a, c, g, or t
  misc_feature (404)..(404): n is a, c, g, or t
  misc_feature (446)..(446): n is a, c, g, or t
  misc_feature (474)..(474): n is a, c, g, or t
  misc_feature (501)..(501): n is a, c, g, or t
  misc_feature (530)..(530): n is a, c, g, or t
  misc_feature (560)..(560): n is a, c, g, or t
  misc_feature (562)..(562): n is a, c, g, or t
  misc_feature (585)..(585): n is a, c, g, or t
  misc_feature (598)..(598): n is a, c, g, or t
ttgagaaacagtctgttcaatagaaggcttcttgataggttctattcagattctcaatatgttacatatctacattcagcaagaaggagaaggagattggtggcccgagcctctcttctccgccaaggtacatctgtccatttaaccatccaatctgttccttaaaaagcaagcactttctttagagagtttctgctaaccatatagtgcatgtgtttatgtttaggaaatggcaccactggtggatttcctattttcctattgntttcttttacgataaaatttgggagggcttgaccccctagaaaatacccacagtgagataaaacaacacatgccaaaagaagatcaaatggttacattcatttgaaacatgttgtgttatacttggcaaaaaagggggntgggcctgaaattttgaaagccacactgttctaatgagaganagagagagagagaaagagagagaggccntaatatttatttcacttaaaggtaaanggtctttttttaatgttcattcatagggncagggaatcaatggaaataatacctggggngngggtggaattcaatacactactntgcccctgccagngg

SEQ ID NO: 215117 - DNA, 596 bp, Canis familiaris; identical to SEQ ID NO: 5010
  misc_feature (418)..(418): n is a, c, g, or t
  misc_feature (473)..(473): n is a, c, g, or t
  misc_feature (517)..(517): n is a, c, g, or t
  misc_feature (555)..(555): n is a, c, g, or t
  misc_feature (560)..(560): n is a, c, g, or t
  misc_feature (572)..(572): n is a, c, g, or t

SEQ ID NO: 215118 - DNA, 539 bp, Canis familiaris; identical to SEQ ID NO: 5011
  misc_feature (422)..(422): n is a, c, g, or t

SEQ ID NO: 215119 - DNA, 368 bp, Canis familiaris; identical to SEQ ID NO: 5012
  misc_feature (49)..(49): n is a, c, g, or t

SEQ ID NO: 215120 - DNA, 374 bp, Canis familiaris; identical to SEQ ID NO: 5013
  misc_feature (196)..(196): n is a, c, g, or t
  misc_feature (207)..(207): n is a, c, g, or t
  misc_feature (296)..(296): n is a, c, g, or t
  misc_feature (330)..(330): n is a, c, g, or t

SEQ ID NO: 215121 - DNA, 423 bp, Canis familiaris; identical to SEQ ID NO: 5014
  misc_feature (349)..(349): n is a, c, g, or t
  misc_feature (390)..(390): n is a, c, g, or t
  misc_feature (402)..(402): n is a, c, g, or t

SEQ ID NO: 215122 - DNA, 191 bp, Canis familiaris; identical to SEQ ID NO: 5015
  misc_feature (69)..(69): n is a, c, g, or t
  misc_feature (77)..(77): n is a, c, g, or t
  misc_feature (141)..(141): n is a, c, g, or t
  misc_feature (171)..(171): n is a, c, g, or t
  misc_feature (174)..(174): n is a, c, g, or t

SEQ ID NO: 215123 - DNA, 478 bp, Canis familiaris; identical to SEQ ID NO: 5016
  misc_feature (23)..(23): n is a, c, g, or t
  misc_feature (200)..(200): n is a, c, g, or t
  misc_feature (292)..(292): n is a, c, g, or t
  misc_feature (374)..(374): n is a, c, g, or t
  misc_feature (389)..(389): n is a, c, g, or t
  misc_feature (401)..(401): n is a, c, g, or t
  misc_feature (403)..(403): n is a, c, g, or t
  misc_feature (438)..(439): n is a, c, g, or t
  misc_feature (454)..(454): n is a, c, g, or t

SEQ ID NO: 215124 - DNA, 582 bp, Canis familiaris; identical to SEQ ID NO: 5017
  misc_feature (415)..(415): n is a, c, g, or t
  misc_feature (505)..(505): n is a, c, g, or t
  misc_feature (547)..(547): n is a, c, g, or t

SEQ ID NO: 215125 - DNA, 578 bp, Canis familiaris; identical to SEQ ID NO: 5018
  misc_feature (458)..(458): n is a, c, g, or t
  misc_feature (503)..(503): n is a, c, g, or t
  misc_feature (548)..(548): n is a, c, g, or t

SEQ ID NO: 215126 - DNA, 357 bp, Canis familiaris; identical to SEQ ID NO: 5019
  misc_feature (12)..(12): n is a, c, g, or t
  misc_feature (14)..(14): n is a, c, g, or t
  misc_feature (22)..(22): n is a, c, g, or t
  misc_feature (60)..(60): n is a, c, g, or t
  misc_feature (69)..(69): n is a, c, g, or t
  misc_feature (83)..(83): n is a, c, g, or t
  misc_feature (92)..(92): n is a, c, g, or t
  misc_feature (115)..(115): n is a, c, g, or t
  misc_feature (174)..(174): n is a, c, g, or t
  misc_feature (202)..(202): n is a, c, g, or t
  misc_feature (205)..(205): n is a, c, g, or t
  misc_feature (229)..(229): n is a, c, g, or t
  misc_feature (252)..(252): n is a, c, g, or t
  misc_feature (258)..(258): n is a, c, g, or t
  misc_feature (278)..(278): n is a, c, g, or t
  misc_feature (317)..(318): n is a, c, g, or t
  misc_feature (346)..(346): n is a, c, g, or t
  misc_feature (349)..(349): n is a, c, g, or t

SEQ ID NO: 215127 - DNA, 586 bp, Canis familiaris; identical to SEQ ID NO: 5020
  misc_feature (396)..(396): n is a, c, g, or t
  misc_feature (419)..(419): n is a, c, g, or t
  misc_feature (427)..(427): n is a, c, g, or t
  misc_feature (438)..(438): n is a, c, g, or t
  misc_feature (449)..(449): n is a, c, g, or t
  misc_feature (459)..(459): n is a, c, g, or t
  misc_feature (542)..(542): n is a, c, g, or t

SEQ ID NO: 215128 - DNA, 183 bp, Canis familiaris; identical to SEQ ID NO: 5021
  misc_feature (79)..(79): n is a, c, g, or t
  misc_feature (97)..(97): n is a, c, g, or t
  misc_feature (161)..(161): n is a, c, g, or t

SEQ ID NO: 215129 - DNA, 389 bp, Canis familiaris; identical to SEQ ID NO: 5022

SEQ ID NO: 215130 - DNA, 589 bp, Canis familiaris; identical to SEQ ID NO: 5023
  misc_feature (455)..(455): n is a, c, g, or t
  misc_feature (578)..(578): n is a, c, g, or t

SEQ ID NO: 215131 - DNA, 520 bp, Canis familiaris; identical to SEQ ID NO: 5024
  misc_feature (294)..(294): n is a, c, g, or t
  misc_feature (337)..(337): n is a, c, g, or t
  misc_feature (380)..(380): n is a, c, g, or t
  misc_feature (404)..(404): n is a, c, g, or t
  misc_feature (410)..(410): n is a, c, g, or t
  misc_feature (428)..(428): n is a, c, g, or t
  misc_feature (438)..(438): n is a, c, g, or t
  misc_feature (441)..(441): n is a, c, g, or t
  misc_feature (479)..(479): n is a, c, g, or t
  misc_feature (501)..(501): n is a, c, g, or t

SEQ ID NO: 215132 - DNA, 600 bp, Canis familiaris
  misc_feature (595)..(595): n is a, c, g, or t
catcctgacactaggagaggtcccaaaggatcaggtctatgcactgaagctcaagggcatctccatctgcttctccatgctgaaggctgccctcagtgggagttacgtcaattttggagtcttccgtctctatggagatgatgcgctggacaatgctctacagaccttcatcaagctgctcctctctattccccacagtgacctcctggactaccccaagctcagccagtcttactattcactactggaagtcctgacccaggaccacatgaactttattgcaagtctggaacctcatgtcatcatgtatattctctcttccatttctgaaggacttactgcacttgacaccatggtatgcacaggctgctgctcctgcctggaccacatcgtgacatacctctttaagcaactgtcacggagcaccaagaagaggacgacacccctaaacaggagagtgaccgttttctgcatatcatgcagcagcattcagagatgatccaccagatgctgtcaacggtgctgaacatcatcatctttgaaactgtaggaaccaatgggctatgtctcggccctacttggcttgaactacttnatgaa

SEQ ID NO: 215133 - DNA, 267 bp, Canis familiaris; identical to SEQ ID NO: 5026
  misc_feature (48)..(48): n is a, c, g, or t
  misc_feature (191)..(191): n is a, c, g, or t
  misc_feature (233)..(233): n is a, c, g, or t

SEQ ID NO: 215134 - DNA, 588 bp, Canis familiaris; identical to SEQ ID NO: 5027
  misc_feature (324)..(324): n is a, c, g, or t
  misc_feature (502)..(502): n is a, c, g, or t
  misc_feature (573)..(573): n is a, c, g, or t

SEQ ID NO: 215135 - DNA, 291 bp, Canis familiaris; identical to SEQ ID NO: 5028
  misc_feature (13)..(13): n is a, c, g, or t
  misc_feature (31)..(31): n is a, c, g, or t
  misc_feature (48)..(48): n is a, c, g, or t
  misc_feature (59)..(59): n is a, c, g, or t
  misc_feature (73)..(73): n is a, c, g, or t
  misc_feature (75)..(75): n is a, c, g, or t
  misc_feature (105)..(105): n is a, c, g, or t
  misc_feature (173)..(173): n is a, c, g, or t
  misc_feature (198)..(198): n is a, c, g, or t
  misc_feature (204)..(204): n is a, c, g, or t
  misc_feature (218)..(218): n is a, c, g, or t
  misc_feature (233)..(233): n is a, c, g, or t
  misc_feature (242)..(242): n is a, c, g, or t
  misc_feature (244)..(244): n is a, c, g, or t
  misc_feature (269)..(269): n is a, c, g, or t
  misc_feature (280)..(280): n is a, c, g, or t

SEQ ID NO: 215136 - DNA, 600 bp, Canis familiaris
  misc_feature (350)..(350): n is a, c, g, or t
  misc_feature (363)..(363): n is a, c, g, or t
  misc_feature (370)..(370): n is a, c, g, or t
  misc_feature (387)..(387): n is a, c, g, or t
  misc_feature (452)..(452): n is a, c, g, or t
  misc_feature (498)..(498): n is a, c, g, or t
  misc_feature (523)..(523): n is a, c, g, or t
  misc_feature (553)..(553): n is a, c, g, or t
  misc_feature (555)..(555): n is a, c, g, or t
  misc_feature (576)..(576): n is a, c, g, or t
  misc_feature (582)..(582): n is a, c, g, or t
ttcaggcttccatatatatcaccctgaactttctgtcaccaccaataaggatatttttggctctgcaaataaaaagacaattccttattgtctgaatgtaatacagtcttcattgtactattcaaccctttgtttatttcttttttcattttgtgaaaaaaacccgggttaggccttcttagattattgcttatttatgtgtaacaaatcccacacattctaatagaaagttcttcagttcctcctggtcatataatatatttccatggtatcatatattattatttactgtttacaagactcaattttgaattcaagaataaagcactcttttattctttcaaacaganattttgccacttngaccctntaaaaggtttgtacttnttattttgcggacctatagattcattcttgatcatgcaagttttcaaaataaagctagggaaatnagggtctactgataaattaagtaaaagattgggcattatgacattnctattattaaacctctaaatattcnctggacacctatttctttttggatactganancccacaatttttacctacttnaaaccngggtgggtactgcatgga

SEQ ID NO: 215137 - DNA, 600 bp, Canis familiaris
  misc_feature (341)..(341): n is a, c, g, or t
  misc_feature (365)..(365): n is a, c, g, or t
  misc_feature (382)..(382): n is a, c, g, or t
  misc_feature (388)..(388): n is a, c, g, or t
  misc_feature (469)..(471): n is a, c, g, or t
  misc_feature (473)..(473): n is a, c, g, or t
  misc_feature (507)..(507): n is a, c, g, or t
  misc_feature (511)..(512): n is a, c, g, or t
  misc_feature (547)..(547): n is a, c, g, or t
  misc_feature (568)..(568): n is a, c, g, or t
  misc_feature (588)..(588): n is a, c, g, or t
  misc_feature (599)..(599): n is a, c, g, or t
gaccctcccagaggcacggatccaagtacctggcctcagcaagcgccatggatcacgccaggcatggcttcctcccgaggcacagagacacgggcatccttgactccctcgggcgcttctttggcggtgacaggggtgtgcccaagcggggctcaggcaaggatggacatcacgcagcgagaactgcccactatggctccctgccccagaagtcccagcatggccggccccaagacgaaaaccccgtagtgcatttcttcaagaacattgtgacaccacaccgtagcggaattcatgcgtggcagagaggggacagggaggcgaggtcgggctgggccacngccccagcgggaaacaggagcttntcggaaattatgcgacngcagancgggagccttgggtgggcttcacgaaccacctgttttcccccagagcccaacaggagggggccagggagacgctttttttnnnanccgggaattggaggagttttttgggtgggcctcncaannggtaacctttcacacaatcccacgggagggcacanttgaagatactaacctttggnggacgggataacccccgtcngttggaattcnt

SEQ ID NO: 215138 - DNA, 469 bp, Canis familiaris; identical to SEQ ID NO: 5031
  misc_feature (390)..(390): n is a, c, g, or t
  misc_feature (408)..(408): n is a, c, g, or t
  misc_feature (430)..(430): n is a, c, g, or t
  misc_feature (448)..(448): n is a, c, g, or t

SEQ ID NO: 215139 - DNA, 600 bp, Canis familiaris
  misc_feature (420)..(420): n is a, c, g, or t
  misc_feature (485)..(485): n is a, c, g, or t
  misc_feature (494)..(494): n is a, c, g, or t
  misc_feature (502)..(502): n is a, c, g, or t
  misc_feature (510)..(510): n is a, c, g, or t
  misc_feature (542)..(542): n is a, c, g, or t
  misc_feature (567)..(567): n is a, c, g, or t
  misc_feature (584)..(584): n is a, c, g, or t
  misc_feature (593)..(593): n is a, c, g, or t
tgacgtcagaagctctgaaaaaactagggaaaagcagcactaaaggaagtaagaccaggagaagcaataattcaagccaaacacaatgagaaactaggacctggtgactaaatccatgtgaaaataaaagaagaatctaggtttctgatgtgaacatcttgggacttaagaatataagcaacacttcaattggagactcacaaagttgacagtgtctttgtggcagccaattgcagatatcttttgagcatctatggaactcaggagagatgtgctgaaaactcagacttcctaggtagttttgatgaaaccgaagtgagttttcagaaaaaaaaaaaaaaaatgtgtataccagaatttgctaaaaactggcgattgccaaataattttaaagaaaacttgagatctggtttcattggnattgatttggaagtcattaacctaaacccactgggtaaatacatgggaacagaggaatatttganaatggaaangggcaaanggcagaanggtaattagggatgtcagcttttttaaaaggngaccagagagggagagacccagggnggttttttgcatgaaanggcccctgntcctgct

SEQ ID NO: 215140 - DNA, 389 bp, Canis familiaris; identical to SEQ ID NO: 5033
  misc_feature (46)..(46): n is a, c, g, or t
  misc_feature (95)..(95): n is a, c, g, or t
  misc_feature (170)..(170): n is a, c, g, or t
  misc_feature (190)..(190): n is a, c, g, or t
  misc_feature (302)..(302): n is a, c, g, or t
  misc_feature (305)..(305): n is a, c, g, or t
  misc_feature (308)..(308): n is a, c, g, or t
  misc_feature (359)..(359): n is a, c, g, or t
  misc_feature (381)..(381): n is a, c, g, or t

SEQ ID NO: 215141 - DNA, 424 bp, Canis familiaris; identical to SEQ ID NO: 5034
  misc_feature (398)..(398): n is a, c, g, or t
  misc_feature (401)..(401): n is a, c, g, or t

SEQ ID NO: 215142 - DNA, 600 bp, Canis familiaris
  misc_feature (490)..(490): n is a, c, g, or t
  misc_feature (520)..(520): n is a, c, g, or t
  misc_feature (524)..(524): n is a, c, g, or t
  misc_feature (531)..(531): n is a, c, g, or t
  misc_feature (549)..(549): n is a, c, g, or t
  misc_feature (552)..(552): n is a, c, g, or t
  misc_feature (568)..(568): n is a, c, g, or t
  misc_feature (581)..(581): n is a, c, g, or t
  misc_feature (595)..(595): n is a, c, g, or t
aggtcaacaatcccagagcagcaatgtccaagtggcttgaattggtgaagtaggatttttgagtttttctccgggctctagatgagccagcccttgacaggacttgtgcacatgtgcccatgcgcctcagacccctaagatctagcctcaaatgcccagagatgtggaagagccctggcaggtctcagtaagagaacaagaacacccatggctagaagcctgctggccttagagttagccgtgacacttacccaagtttttggggaatcaggcccgtgtttctaaagggacattctggtttgggaccctagtgagtttcagtcatcgtgtaggcagcttggatagttttaacattcataggaaatctctctgagtggaccatgaatgaagctgttgggggtgaggaagaacaggacctggaaattggaaccagcagaagtcccctgttgacaagaaggagcattcactttcaaaggagtggttccccggnggtttttattggttaccaaggctaaccggntttnaggcctnaaaagcagcctaacttcntgnatatttgacaaggggntttttgagggagncccaaacccagggnctttt

SEQ ID NO: 215143 - DNA, 367 bp, Canis familiaris; identical to SEQ ID NO: 5036
  misc_feature (203)..(203): n is a, c, g, or t
  misc_feature (356)..(356): n is a, c, g, or t

SEQ ID NO: 215144 - DNA, 395 bp, Canis familiaris; identical to SEQ ID NO: 5037
  misc_feature (197)..(197): n is a, c, g, or t
  misc_feature (215)..(215): n is a, c, g, or t
  misc_feature (320)..(320): n is a, c, g, or t
  misc_feature (376)..(376): n is a, c, g, or t

SEQ ID NO: 215145 - DNA, 518 bp, Canis familiaris; identical to SEQ ID NO: 5038
  misc_feature (397)..(397): n is a, c, g, or t
  misc_feature (404)..(404): n is a, c, g, or t
  misc_feature (440)..(440): n is a, c, g, or t
  misc_feature (456)..(456): n is a, c, g, or t
  misc_feature (478)..(478): n is a, c, g, or t
  misc_feature (489)..(489): n is a, c, g, or t
  misc_feature (499)..(499): n is a, c, g, or t
  misc_feature (506)..(506): n is a, c, g, or t

SEQ ID NO: 215146 - DNA, 388 bp, Canis familiaris; identical to SEQ ID NO: 5039
  misc_feature (363)..(363): n is a, c, g, or t
  misc_feature (377)..(377): n is a, c, g, or t

SEQ ID NO: 215147 - DNA, 392 bp, Canis familiaris; identical to SEQ ID NO: 5040
  misc_feature (386)..(386): n is a, c, g, or t

SEQ ID NO: 215148 - DNA, 239 bp, Canis familiaris; identical to SEQ ID NO: 5041
  misc_feature (46)..(46): n is a, c, g, or t
  misc_feature (87)..(87): n is a, c, g, or t
  misc_feature (159)..(159): n is a, c, g, or t
  misc_feature (179)..(179): n is a, c, g, or t
  misc_feature (211)..(211): n is a, c, g, or t
  misc_feature (224)..(224): n is a, c, g, or t

SEQ ID NO: 215149 - DNA, 512 bp, Canis familiaris; identical to SEQ ID NO: 5042
  misc_feature (239)..(239): n is a, c, g, or t
  misc_feature (242)..(242): n is a, c, g, or t
  misc_feature (341)..(341): n is a, c, g, or t
  misc_feature (355)..(355): n is a, c, g, or t
  misc_feature (383)..(383): n is a, c, g, or t
  misc_feature (388)..(388): n is a, c, g, or t
  misc_feature (416)..(416): n is a, c, g, or t
  misc_feature (424)..(424): n is a, c, g, or t
  misc_feature (435)..(435): n is a, c, g, or t
  misc_feature (453)..(453): n is a, c, g, or t
  misc_feature (476)..(476): n is a, c, g, or t

SEQ ID NO: 215150 - DNA, 482 bp, Canis familiaris; identical to SEQ ID NO: 5043
  misc_feature (385)..(385): n is a, c, g, or t
  misc_feature (403)..(403): n is a, c, g, or t
  misc_feature (421)..(421): n is a, c, g, or t
  misc_feature (423)..(423): n is a, c, g, or t
  misc_feature (433)..(433): n is a, c, g, or t
  misc_feature (460)..(460): n is a, c, g, or t
  misc_feature (464)..(464): n is a, c, g, or t

SEQ ID NO: 215151 - DNA, 157 bp, Canis familiaris; identical to SEQ ID NO: 5044
  misc_feature (7)..(7): n is a, c, g, or t
  misc_feature (34)..(34): n is a, c, g, or t
  misc_feature (82)..(82): n is a, c, g, or t
  misc_feature (98)..(98): n is a, c, g, or t

SEQ ID NO: 215152 - DNA, 387 bp, Canis familiaris; identical to SEQ ID NO: 5045
  misc_feature (293)..(293): n is a, c, g, or t
  misc_feature (347)..(347): n is a, c, g, or t

SEQ ID NO: 215153 - DNA, 145 bp, Canis familiaris; identical to SEQ ID NO: 5046
  misc_feature (49)..(49): n is a, c, g, or t
  misc_feature (91)..(91): n is a, c, g, or t
  misc_feature (94)..(94): n is a, c, g, or t
  misc_feature (99)..(99): n is a, c, g, or t

SEQ ID NO: 215154 - DNA, 437 bp, Canis familiaris; identical to SEQ ID NO: 5047
  misc_feature (413)..(414): n is a, c, g, or t

SEQ ID NO: 215155 - DNA, 468 bp, Canis familiaris; identical to SEQ ID NO: 5048
  misc_feature (410)..(410): n is a, c, g, or t
  misc_feature (441)..(441): n is a, c, g, or t
  misc_feature (455)..(455): n is a, c, g, or t

SEQ ID NO: 215156 - DNA, 578 bp, Canis familiaris; identical to SEQ ID NO: 5049
  misc_feature (348)..(348): n is a, c, g, or t
  misc_feature (350)..(350): n is a, c, g, or t
  misc_feature (355)..(355): n is a, c, g, or t
  misc_feature (444)..(444): n is a, c, g, or t
  misc_feature (452)..(452): n is a, c, g, or t
  misc_feature (475)..(475): n is a, c, g, or t
  misc_feature (514)..(514): n is a, c, g, or t
  misc_feature (528)..(528): n is a, c, g, or t
  misc_feature (534)..(534): n is a, c, g, or t

SEQ ID NO: 215157 - DNA, 420 bp, Canis familiaris; identical to SEQ ID NO: 5050
  misc_feature (209)..(209): n is a, c, g, or t
  misc_feature (222)..(222): n is a, c, g, or t
  misc_feature (258)..(258): n is a, c, g, or t
  misc_feature (362)..(362): n is a, c, g, or t

SEQ ID NO: 215158 - DNA, 263 bp, Canis familiaris; identical to SEQ ID NO: 5051
  misc_feature (44)..(44): n is a, c, g, or t
  misc_feature (120)..(120): n is a, c, g, or t
  misc_feature (239)..(239): n is a, c, g, or t

SEQ ID NO: 215159 - DNA, 344 bp, Canis familiaris; identical to SEQ ID NO: 5052

SEQ ID NO: 215160 - DNA, 392 bp, Canis familiaris; identical to SEQ ID NO: 5053
  misc_feature (292)..(292): n is a, c, g, or t
  misc_feature (310)..(310): n is a, c, g, or t

SEQ ID NO: 215161 - DNA, 372 bp, Canis familiaris; identical to SEQ ID NO: 5054

SEQ ID NO: 215162 - DNA, 426 bp, Canis familiaris; identical to SEQ ID NO: 5055
  misc_feature (262)..(262): n is a, c, g, or t
  misc_feature (390)..(391): n is a, c, g, or t

SEQ ID NO: 215163 - DNA, 600 bp, Canis familiaris
  misc_feature (208)..(208): n is a, c, g, or t
  misc_feature (229)..(229): n is a, c, g, or t
  misc_feature (371)..(371): n is a, c, g, or t
  misc_feature (374)..(374): n is a, c, g, or t
  misc_feature (384)..(384): n is a, c, g, or t
  misc_feature (412)..(412): n is a, c, g, or t
  misc_feature (420)..(420): n is a, c, g, or t
  misc_feature (424)..(424): n is a, c, g, or t
  misc_feature (462)..(462): n is a, c, g, or t
  misc_feature (488)..(488): n is a, c, g, or t
  misc_feature (507)..(507): n is a, c, g, or t
  misc_feature (573)..(573): n is a, c, g, or t
cgcgaccccggacaccagaaaccgacagcacacctcgtccacaccagcaccaagcgatgaagcgaccgtctcacaaaactctcttcaagtcactcaccctgcccggggtgacgaggttgtctacaccgaccaagtcccgctgcagctccgtcagcttctggaggttctccagccgggcgaggctgtgctggagtgcggacgtcacctntgtgatggcctggagggcgtntgtggggagaggcccctcagcacaggcgcgggcaggtgggcacgggcaaccccacccacgcctctgtgacaggaactgtcctcttacttattcaaaggttttatcttgagagagcgagtgaacctgggcaggggtgaggganaanagttaccccnaccgaggccgggagccccaacacggggnttcgaccncagnacccggaaaacttttaacctaagcccgaaggcagatgnttcaccacgggagccagccagctggnttttggaaccggcgttttnaaaaggcagtttagggatccctgggtggtgcagcggtttggcgcctgcttttggccaggggcgggntcctggagacccaggatcgaatcccac

SEQ ID NO: 215164 - DNA, 487 bp, Canis familiaris; identical to SEQ ID NO: 5057
  misc_feature (309)..(309): n is a, c, g, or t
  misc_feature (404)..(404): n is a, c, g, or t
  misc_feature (417)..(417): n is a, c, g, or t
  misc_feature (436)..(436): n is a, c, g, or t
  misc_feature (466)..(466): n is a, c, g, or t
  misc_feature (486)..(486): n is a, c, g, or t

SEQ ID NO: 215165 - DNA, 360 bp, Canis familiaris; identical to SEQ ID NO: 5058
  misc_feature (152)..(152): n is a, c, g, or t
  misc_feature (168)..(168): n is a, c, g, or t
  misc_feature (178)..(178): n is a, c, g, or t
  misc_feature (209)..(209): n is a, c, g, or t
  misc_feature (227)..(227): n is a, c, g, or t
  misc_feature (233)..(233): n is a, c, g, or t
  misc_feature (269)..(269): n is a, c, g, or t
  misc_feature (285)..(285): n is a, c, g, or t
  misc_feature (348)..(348): n is a, c, g, or t

SEQ ID NO: 215166 - DNA, 531 bp, Canis familiaris; identical to SEQ ID NO: 5059
  misc_feature (214)..(214): n is a, c, g, or t
  misc_feature (398)..(398): n is a, c, g, or t
  misc_feature (416)..(416): n is a, c, g, or t
  misc_feature (439)..(439): n is a, c, g, or t
  misc_feature (459)..(459): n is a, c, g, or t
  misc_feature (473)..(473): n is a, c, g, or t
  misc_feature (481)..(481): n is a, c, g, or t
  misc_feature (500)..(500): n is a, c, g, or t
  misc_feature (508)..(508): n is a, c, g, or t

SEQ ID NO: 215167 - DNA, 600 bp, Canis familiaris
  misc_feature (40)..(40): n is a, c, g, or t
  misc_feature (287)..(287): n is a, c, g, or t
  misc_feature (318)..(318): n is a, c, g, or t
  misc_feature (366)..(366): n is a, c, g, or t
  misc_feature (376)..(376): n is a, c, g, or t
  misc_feature (383)..(383): n is a, c, g, or t
  misc_feature (395)..(395): n is a, c, g, or t
  misc_feature (413)..(413): n is a, c, g, or t
  misc_feature (418)..(418): n is a, c, g, or t
  misc_feature (430)..(430): n is a, c, g, or t
  misc_feature (446)..(446): n is a, c, g, or t
  misc_feature (509)..(510): n is a, c, g, or t
  misc_feature (515)..(515): n is a, c, g, or t
  misc_feature (534)..(534): n is a, c, g, or t
  misc_feature (552)..(552): n is a, c, g, or t
  misc_feature (582)..(582): n is a, c, g, or t
gacctgtcgggactctccatagaagaagtgtccaagtcgntacggtttattggtttgtctgaagatgtcatatcgttcttcgttactgaaaagattgatgggaatttgctcgttcagctgaccgaagaaatcctctccgaggatttcaaattgagcaaactgcaggtgaagaaaatcatgcaattcattaatggctggaggcccaagatatagccaaataaccccagctagcagtgaacaaaactgacagattggtgtgctaggaagggtgggctgggacacaattncatgttttttgcactaaaaaccttctctgtnaatagggataagagaaactcttactatgcagatacatttttgaatggngaacagcttnttttgancatcaataaaangctgtacagaacacttanagggngccttgtacatnactcacactcaacagntggtaaaagacaaaaggcatgttcagagaaataattctacccaagtaggttatgtgagaaggnntgatntttattacaaaataaccangcttgaaaaccctttgantcaaaaccaaacaaacatactaacaccccnccaaacaaccaaaaacaa

SEQ ID NO: 215168 - DNA, 524 bp, Canis familiaris; identical to SEQ ID NO: 5061
  misc_feature (460)..(460): n is a, c, g, or t
  misc_feature (466)..(466): n is a, c, g, or t

SEQ ID NO: 215169 - DNA, 379 bp, Canis familiaris; identical to SEQ ID NO: 5062

SEQ ID NO: 215170 - DNA, 461 bp, Canis familiaris; identical to SEQ ID NO: 5063
  misc_feature (376)..(376): n is a, c, g, or t
  misc_feature (387)..(387): n is a, c, g, or t
  misc_feature (414)..(414): n is a, c, g, or t
  misc_feature (446)..(447): n is a, c, g, or t

SEQ ID NO: 215171 - DNA, 307 bp, Canis familiaris; identical to SEQ ID NO: 5064

SEQ ID NO: 215172 - DNA, 404 bp, Canis familiaris; identical to SEQ ID NO: 5065
  misc_feature (395)..(395): n is a, c, g, or t

SEQ ID NO: 215173 - DNA, 399 bp, Canis familiaris; identical to SEQ ID NO: 5066

SEQ ID NO: 215174 - DNA, 439 bp, Canis familiaris; identical to SEQ ID NO: 5067

SEQ ID NO: 215175 - DNA, 568 bp, Canis familiaris; identical to SEQ ID NO: 5068
  misc_feature (394)..(394): n is a, c, g, or t
  misc_feature (422)..(422): n is a, c, g, or t
  misc_feature (440)..(440): n is a, c, g, or t
  misc_feature (445)..(445): n is a, c, g, or t
  misc_feature (471)..(472): n is a, c, g, or t
  misc_feature (510)..(510): n is a, c, g, or t
  misc_feature (521)..(521): n is a, c, g, or t
  misc_feature (535)..(535): n is a, c, g, or t
  misc_feature (540)..(540): n is a, c, g, or t

SEQ ID NO: 215176 - DNA, 232 bp, Canis familiaris; identical to SEQ ID NO: 5069
  misc_feature (165)..(165): n is a, c, g, or t

SEQ ID NO: 215177 - DNA, 408 bp, Canis familiaris; identical to SEQ ID NO: 5070

SEQ ID NO: 215178 - DNA, 600 bp, Canis familiaris
  misc_feature (300)..(300): n is a, c, g, or t
  misc_feature (321)..(322): n is a, c, g, or t
  misc_feature (382)..(382): n is a, c, g, or t
  misc_feature (396)..(396): n is a, c, g, or t
  misc_feature (400)..(400): n is a, c, g, or t
  misc_feature (414)..(414): n is a, c, g, or t
  misc_feature (431)..(431): n is a, c, g, or t
  misc_feature (473)..(473): n is a, c, g, or t
  misc_feature (481)..(481): n is a, c, g, or t
  misc_feature (519)..(519): n is a, c, g, or t
  misc_feature (536)..(536): n is a, c, g, or t
  misc_feature (544)..(544): n is a, c, g, or t
  misc_feature (567)..(567): n is a, c, g, or t
  misc_feature (592)..(592): n is a, c, g, or t
agagccacatccccagggatttggaggaggcgctggatcccccgaacctctggggagtcctgggtgttggctggaggactggtggggatgttcgatccggggctgagttttccctggtcctgagatgtctgctgctgccctggggacaggtgaggcaggctgtgctggggctgcaggccaggaaagaggctgcctgggcttccagctctccagactggttgatcaccggcctctatccttggcacacaccctgctgccgaggcccaggggcaggaacttggccctggccccggtccaaangggctttccagcgaagcccanngatcccagcgttccaacaagcaaaaacttgccttcttcctttgcgagcttgccaaggggnccccacaagaattncccnaacccaaaggtganggtgcgggccttcacangggatgcttgaatttccacaccaaagttttggtcccattttnagccttcntttttcccatcaagttaaaggggttaaatatttcttgnccaatctatgtttgcanggctgatngggggatcaaaccgggaaaagtnaagtgaaagcccaaatttaccttgngaagaacg

SEQ ID NO: 215179 - DNA, 307 bp, Canis familiaris; identical to SEQ ID NO: 5072
  misc_feature (32)..(33): n is a, c, g, or t
  misc_feature (38)..(38): n is a, c, g, or t
  misc_feature (41)..(41): n is a, c, g, or t
  misc_feature (70)..(70): n is a, c, g, or t
  misc_feature (98)..(98): n is a, c, g, or t
  misc_feature (122)..(122): n is a, c, g, or t
  misc_feature (126)..(126): n is a, c, g, or t
  misc_feature (142)..(142): n is a, c, g, or t
  misc_feature (155)..(155): n is a, c, g, or t
  misc_feature (159)..(159): n is a, c, g, or t
  misc_feature (168)..(168): n is a, c, g, or t
  misc_feature (214)..(214): n is a, c, g, or t
  misc_feature (234)..(234): n is a, c, g, or t
  misc_feature (244)..(244): n is a, c, g, or t
  misc_feature (251)..(251): n is a, c, g, or t

SEQ ID NO: 215180 - DNA, 697 bp, Canis familiaris; identical to SEQ ID NO: 5073
  misc_feature (12)..(12): n is a, c, g, or t
  misc_feature (22)..(22): n is a, c, g, or t
  misc_feature (29)..(29): n is a, c, g, or t
  misc_feature (34)..(34): n is a, c, g, or t
  misc_feature (66)..(66): n is a, c, g, or t
  misc_feature (639)..(640): n is a, c, g, or t
  misc_feature (661)..(661): n is a, c, g, or t
  misc_feature (678)..(678): n is a, c, g, or t
  misc_feature (682)..(682): n is a, c, g, or t
  misc_feature (694)..(694): n is a, c, g, or t

SEQ ID NO: 215181 - DNA, 569 bp, Canis familiaris; identical to SEQ ID NO: 5074

SEQ ID NO: 215182 - DNA, 600 bp, Canis familiaris
  misc_feature (389)..(389): n is a, c, g, or t
  misc_feature (392)..(392): n is a, c, g, or t
  misc_feature (435)..(435): n is a, c, g, or t
  misc_feature (460)..(460): n is a, c, g, or t
  misc_feature (464)..(464): n is a, c, g, or t
  misc_feature (559)..(559): n is a, c, g, or t
  misc_feature (568)..(568): n is a, c, g, or t
  misc_feature (570)..(570): n is a, c, g, or t
aaatactaattcaaagggatacatgccccctgatgttgataacagcattacctacaataaccaagttatggaagtagcccaagtgtccatccatacatgaatagataaagaaaatgtggggtatacacaaaagatttcagctataaaaaaagaatgaaatcttgcctttaacaccacctgtatggaactagagaggattatgctaagcgaaataagtctaagagaaatacaaataccatgtgatttcattcatgtggaattcaagaaacaaaacaaatgagtaaaggggaaaaaaagacaaatcaagaaacagacttaactatagaaaatagattgatgttatcagagggaaggtgggggagggttaggttaaataggtgatgggattnaanggggtgcacttatgatgaacaccaggttgattcactgtattgnacacctgaaactaatactacactgnatgntaactgactagaatttaaataaaaacttaaaaaaataaaatgtatctgcaaagacattttaagatctagacttcttttagagatcatagaagatnttaatggtngngggatccctgggggctcaaggggtttcccg

SEQ ID NO: 215183 - DNA, 600 bp, Canis familiaris
  misc_feature (554)..(554): n is a, c, g, or t
agaagagcggatgactgttgtctgggacaaagcagtggctactggcaaaatggacgagaaccagtttgttgctatcaccagcaccaacgcagccaagatctttaacctgtaccccaggaaagggcggattgcagtgggctcagatgctgatgtagtcatctgggaccctgataaggtgaagaccataacagccaagagtcacaagtcggcggtggagtacaacatcttcgagggcatggagtgccacggctccccgctggtggtcatcagccagggcaagatcgtctttgaggacggcaacattaatgtcaacaagggcatgggccgcttcatcccccggaagcctttccccgagtatctctaccagcgtgtcaggatcaggagcaaggtttcggggttgcaaggtgttcccaggggcatgtacgacggtcctgtgtacgaggtgccagccacacccaaatatgcaactcctgctccctctgccaagtcctcgcctttcaaacaccagcccccgcccatcagaaaccttcaccagtccaacttcagtttatcangtgcccagatagatgacaacaatcccagacgcactggccaccgcat

SEQ ID NO: 215184 - DNA, 372 bp, Canis familiaris; identical to SEQ ID NO: 5077
  misc_feature (2)..(2): n is a, c, g, or t

SEQ ID NO: 215185 - DNA, 600 bp, Canis familiaris
  misc_feature (406)..(406): n is a, c, g, or t
  misc_feature (494)..(494): n is a, c, g, or t
  misc_feature (510)..(510): n is a, c, g, or t
  misc_feature (571)..(571): n is a, c, g, or t
  misc_feature (583)..(583): n is a, c, g, or t
  misc_feature (589)..(589): n is a, c, g, or t
ctacttaatcttcaataagttacttaaactttttccttaaacttatagattttttttttataatctataaaatgaggataatagaagtacctatcttacaggcttggtgcgaagattaaatgagctgacatagcaagtgtcttacacacagtgctgttagggttagcatatttaacaatgaaaactgttattacactgatattcgttagttatgtattacaacatagaaaatgttcaggagagagctttaaatgaaagatactatgtataagatgacataggattacagctataaaaacaagcacttaagtattcttaaaaggactgtgataaatagatcaaactactcactgtggtttgttttagaaccattgcttcctattaattcttagttattggtttttangggtttttttgggtggtaaattttgaggtacttaccacagtacacagttgttttattgatctggttactggatttttgattgtctctncctctagaagggaagntttctgagaaagaacacatgggtgggttttttttttttttttatgggggggtttttttaancattggatatcntggggncaaggacctac

SEQ ID NO: 215186 - DNA, 600 bp, Canis familiaris
  misc_feature (384)..(384): n is a, c, g, or t
  misc_feature (433)..(433): n is a, c, g, or t
  misc_feature (478)..(478): n is a, c, g, or t
  misc_feature (514)..(514): n is a, c, g, or t
  misc_feature (540)..(540): n is a, c, g, or t
  misc_feature (560)..(560): n is a, c, g, or t
  misc_feature (565)..(565): n is a, c, g, or t
  misc_feature (575)..(575): n is a, c, g, or t
  misc_feature (591)..(591): n is a, c, g, or t
ttattcttcttgcttttttttttccaatggaaggctgtatttggaaaatgccagagctttgatatgataaaaacccagaaatagttttattgtggtattggataagtggccttaaataagtcatgtaggtagcatcagtaggcttcagttccgtagctgtaaaatggtcattataatgtacacatacctggtgcatcatagacttatttttctctcccaggagttagttttttggggagaatgttatgggttttggcatgttttagcgactctttatcttctttcctacccctctcattccttcctcaaagaggagaaattagcatatttcactatgacatttatgcaggcaataaacatttatgaagtttaagtagtgggaanggaatctctttcttccacaaagaagaaggatttttctccatacatttcnttgggtatcattgggccacaagtctcttagtctgaattatatagnatattttgctctgcattcaaagctggcccgtaaagngaatatataaagcctgggattccaanataatctgggaatggatcanggggnaaattttctncctttggggcctaaanaacccaatg

SEQ ID NO: 215187 - DNA, 600 bp, Canis familiaris
  misc_feature (436)..(436): n is a, c, g, or t
  misc_feature (518)..(518): n is a, c, g, or t
  misc_feature (539)..(539): n is a, c, g, or t
  misc_feature (546)..(546): n is a, c, g, or t
  misc_feature (559)..(559): n is a, c, g, or t
  misc_feature (593)..(593): n is a, c, g, or t
  misc_feature (595)..(595): n is a, c, g, or t
aagaatactccctcttattgggagatcagtgatggtgtgaactaagttagctgcttttctacttaattttccttctgaattcacttatttcactgataatgaataataccaattaagtatagggttatagaatggtatcagcaaagagaggaaactttcatctatccctgttctctgcccatctgcaccaataaaatgataagatagaaatagagggtagggtgataaatttatcctttcaaatgaagacttagggatctctgtagactttaggttttgattccatggctcttccccagtgaccaaaatgaactataccatctgtcttataaatgtcagttggtgatctaggacccatatctcaacacaaatgagccatcctattccttaagtgaatcctattatgggaagggaggaagtgtgggtgagtaccaangatgtcatctcaagggcattccccaaagtagtggctcttaaacctgcacatgcatcagaatcagttgggaggctttattcangtacaggttcgctgggcccancaacagntttctgattcagnggacctgggggggagtcccgagtagttgcatttntnacagg

SEQ ID NO: 215188 - DNA, 600 bp, Canis familiaris
  misc_feature (505)..(505): n is a, c, g, or t
acatggagctgccctcctggctcagttttgggcactaccgcatccagggcatcctcagcagcggtgggaagcgtctgggctgtgtcaagatctctgcctctctgatgggcaaataatgtggcaccagcaatagcagaaagaaggggcctgagaaaggtatccctcttcttctgtcttgcatttgctgaggtcaaatcctgactctctgtaccccttcaagccctttctgcaatgatgccacttccctcactgagaatcattttgtgccacctgcatggcatgggtgggcagccctgacctaggggtgcggcttggcagctctgatagcccacagcagctgccaggctggccgcttcatttccctccttgactctataactttctctctaagagcttaattcattttctaaacaatcaaggaatgggaccaatgtattttgtgatccttgagttcagaccaacccagttgtagttttcagaagttacctttggtaattttctttanaaaaatttttttgggtcactgacttaaaagcagaatgggaagtattaataacactttttgctttacttttgtcccccttatgaggaaggggctga

SEQ ID NO: 215189 - DNA, 739 bp, Canis familiaris; identical to SEQ ID NO: 5082
  misc_feature (525)..(525): n is a, c, g, or t
  misc_feature (595)..(595): n is a, c, g, or t
  misc_feature (653)..(653): n is a, c, g, or t
  misc_feature (661)..(661): n is a, c, g, or t
  misc_feature (679)..(679): n is a, c, g, or t
  misc_feature (684)..(684): n is a, c, g, or t
  misc_feature (706)..(706): n is a, c, g, or t
  misc_feature (729)..(729): n is a, c, g, or t

SEQ ID NO: 215190 - DNA, 600 bp, Canis familiaris
gtgcacatgtgcacatatacacacacattagcagaagggattcattttaatatgccttccctctggccttcttacaaagtctgttggtcccttttcttctgtcagcgtgttgaattgcaaactgtgtacggctgtaaatactttgtttacttcaagctgaatgtttgcaaacagttgatatgagtattagtagaaaactcctggtaattaatgagcccgggtgtgcgaggcttcctgcaaatagctccacctggagtgctgacgacctgggacacctccagtcctgtggcacccaccagcagattgcaatggcagagtgtacatggacagtcaggaagtcctgcttgatggaaacgaaagggaaaggatgaggatgtggggctaatatcacgaggcacagatgatcttttcttctgtggtgttgctggttcttataataatataagcatgccctcccatgagtcttgattcaaaataaaagaatgtactaagtaagcaaagccaatgaagagtatttcagaaaaatactttgtaaatgagatgtcagtagtgttcaaagttgtatttttaaaagataaatattccttttttatacctcaa

SEQ ID NO: 215191 - DNA, 600 bp, Canis familiaris
  misc_feature (472)..(472): n is a, c, g, or t
  misc_feature (504)..(504): n is a, c, g, or t
  misc_feature (508)..(508): n is a, c, g, or t
  misc_feature (529)..(529): n is a, c, g, or t
  misc_feature (540)..(540): n is a, c, g, or t
  misc_feature (569)..(569): n is a, c, g, or t
  misc_feature (597)..(597): n is a, c, g, or t
aaggagccctgtgccctctcatgcccgcagccagcccgggctgtgcaacatgtaccaggatggacatcacgcagcgttcagccacccgagattgagcaatttagctggggagccgagggccagaagccgggatttggctacggaggccgcgctccagctcacaaggggctcaagggcaccgacgcccagggcacgctttccaaaatcttcaaactgggaggaagagatagtcgttccgggtcacccatggctagacgctgaagcccgcctcgtggccgcagaaccctgtcctcagcttcttaatatcaccgccttcgacgttaacaccgccccgtacctccccacccgtagcgagcaccctcctgcctaacgcccgtccagttgtgcccgcagcaggggtcaggcgcgcccaggcccaccggcggtttccggccacgagcttcgatgggaggaaacacagacccgggtattncacagccacgctgagcctggagacgacgcgtncccnggggccttagcccccggcagngcagccccggnccgacgcgcgccttcgttcttcgaccggnttcgttgaaccggatccttgggttttgnagg

SEQ ID NO: 215192 - DNA, 396 bp, Canis familiaris; identical to SEQ ID NO: 5085

SEQ ID NO: 215193 - DNA, 690 bp, Canis familiaris; identical to SEQ ID NO: 5086
  misc_feature (334)..(334): n is a, c, g, or t
  misc_feature (347)..(347): n is a, c, g, or t
  misc_feature (471)..(471): n is a, c, g, or t
  misc_feature (482)..(482): n is a, c, g, or t
  misc_feature (537)..(538): n is a, c, g, or t
  misc_feature (563)..(563): n is a, c, g, or t
  misc_feature (603)..(603): n is a, c, g, or t
  misc_feature (627)..(627): n is a, c, g, or t
  misc_feature (645)..(645): n is a, c, g, or t
  misc_feature (663)..(663): n is a, c, g, or t
  misc_feature (683)..(683): n is a, c, g, or t

SEQ ID NO: 215194 - DNA, 600 bp, Canis familiaris
  misc_feature (387)..(387): n is a, c, g, or t
  misc_feature (396)..(396): n is a, c, g, or t
  misc_feature (454)..(454): n is a, c, g, or t
  misc_feature (543)..(543): n is a, c, g, or t
  misc_feature (571)..(571): n is a, c, g, or t
  misc_feature (579)..(579): n is a, c, g, or t
  misc_feature (584)..(584): n is a, c, g, or t
attgttctggataactcggtcttcagtgagcacaggaatctccagaatctgctgatcctaaccgccattaaggcagaccgcacacgggtcatggagtacatcagccgcctggacaactacgatgccccagacattgcaaacatcgccgtaagcagcgcactgtatgaggaggcctttgccattttccgcaagtttgatgtaaacgcctcagcaatccaggtcctgattgagcacattggaaacctggaccgagcatacgagtttgcagagagatgtaatgagcctgctgtatggagtcagctggcccgcgcccagctccagaaagacttggtgaaagaatccatcgactcctacatcagagcggacgacccttcctcttacttagangtcgttcangcagccagcaagagcaacaattgggaggatctggttaaatttctacagatggccaggnaaaaagggccgagaatcctatgtagagactgaacttatttttttgccctggctaaaaccagcccgtctgtctgaactagaaaaattgtnttaatgggacccaacaatggcccacatncaacaggntgganaccgctgttaccagga

SEQ ID NO: 215195 - DNA, 500 bp, Canis familiaris; identical to SEQ ID NO: 5088
  misc_feature (262)..(262): n is a, c, g, or t
  misc_feature (316)..(316): n is a, c, g, or t
  misc_feature (414)..(414): n is a, c, g, or t
  misc_feature (417)..(417): n is a, c, g, or t
  misc_feature (443)..(443): n is a, c, g, or t
  misc_feature (457)..(457): n is a, c, g, or t
  misc_feature (476)..(476): n is a, c, g, or t
  misc_feature (481)..(481): n is a, c, g, or t
  misc_feature (483)..(483): n is a, c, g, or t

SEQ ID NO: 215196 - DNA, 600 bp, Canis familiaris
  misc_feature (432)..(432): n is a, c, g, or t
  misc_feature (456)..(456): n is a, c, g, or t
  misc_feature (479)..(479): n is a, c, g, or t
  misc_feature (495)..(495): n is a, c, g, or t
  misc_feature (506)..(506): n is a, c, g, or t
  misc_feature (536)..(536): n is a, c, g, or t
  misc_feature (557)..(557): n is a, c, g, or t
  misc_feature (583)..(583): n is a, c, g, or t
ccgaagaggagccgccccggccccgcgcccccccgggagctccgggccctgggcctggctcgggagcccccggcagccaggaggaggaggaggagccgggactggtcgagggtgacccgggggacggcgccattgaggacccggagctggaagcgatcaaagctcgagtcagggagatggaggaagaagctgagaagttaaaggagctacagaacgaggtagagaaacagatgaatatgagtccacctccaggcaatgctggcccagtgatcatgtccattgaagagaagatggaggctgatgcccgttccatttatgttggcaatgtggactatggtgcaacagcagaagagttggaagcacactttcatggctgtggttcagtcaaccgtgttaccatactctgtgacaaatttagtggccatcctaaangttttgcgtatatagagttctcanaccaaagagtcagtgaggacttncttggccttagatgantcactatttanaggaaaacaaattaaggtgatcccaaaacnaaccaacagaccaggcattancacaacagaccggggtttcccacganccccgataccgtgcccg

SEQ ID NO: 215197 - DNA, 469 bp, Canis familiaris; identical to SEQ ID NO: 5090
  misc_feature (418)..(418): n is a, c, g, or t
  misc_feature (430)..(430): n is a, c, g, or t

SEQ ID NO: 215198 - DNA, 600 bp, Canis familiaris
  misc_feature (138)..(138): n is a, c, g, or t
  misc_feature (207)..(207): n is a, c, g, or t
  misc_feature (292)..(292): n is a, c, g, or t
  misc_feature (315)..(315): n is a, c, g, or t
  misc_feature (362)..(362): n is a, c, g, or t
  misc_feature (372)..(372): n is a, c, g, or t
  misc_feature (427)..(427): n is a, c, g, or t
  misc_feature (445)..(445): n is a, c, g, or t
  misc_feature (479)..(479): n is a, c, g, or t
  misc_feature (482)..(482): n is a, c, g, or t
  misc_feature (510)..(510): n is a, c, g, or t
  misc_feature (522)..(522): n is a, c, g, or t
  misc_feature (535)..(535): n is a, c, g, or t
  misc_feature (542)..(542): n is a, c, g, or t
  misc_feature (559)..(559): n is a, c, g, or t
  misc_feature (569)..(569): n is a, c, g, or t
ggagctccccaggaaagcaggtcctgccccctggcacccccatccctggcacccctggcacaccatctctcctccatccctccctcccacttgcttctcctcccctgctccccaccctttccccccaaaaagccttangtttctcctttttgaaatgtggccttacaattctttctggaaagctgactgccctcttccttcgacttncaccaacatccgagaagaaagagcattctgcagctcttgtgggcaccttctcagccaagggctggcaatctgtagcttggagccncgacagaaagagaaggaactctnctggtggtcctctggggcaacgaaagcttgggtgcttccatcagcanctcgggcggnacgctgtcagcgcacactggcgaggctcgggtccctggggggggtaagaacccanttttccacccggcctttnccaccaggctgggtgacttgatgcgcttattcanganagtctctcgagctctctcttcatctttnctgcctggaaanggagagaactttncatattnccagcggatggggttgngttctcaaanggatcacacttccaatttcttcggttcaagt

SEQ ID NO: 215199 - DNA, 120 bp, Canis familiaris; identical to SEQ ID NO: 5092
  misc_feature (3)..(3): n is a, c, g, or t
  misc_feature (15)..(15): n is a, c, g, or t
  misc_feature (43)..(43): n is a, c, g, or t
  misc_feature (116)..(116): n is a, c, g, or t

SEQ ID NO: 215200 - DNA, 600 bp, Canis familiaris
  misc_feature (1)..(1): n is a, c, g, or t
  misc_feature (29)..(29): n is a, c, g, or t
  misc_feature (468)..(468): n is a, c, g, or t
  misc_feature (487)..(487): n is a, c, g, or t
  misc_feature (494)..(494): n is a, c, g, or t
  misc_feature (515)..(516): n is a, c, g, or t
  misc_feature (526)..(526): n is a, c, g, or t
  misc_feature (576)..(576): n is a, c, g, or t
nctggtacgcctgcaggtaccggtccggnaattcccgggtcgacccacgcgtccgatgcatgtgacacacacatgacactaactccttaaagccttaactctggagtcatagaatgttctgcggtggtacacccatccagctgctcagataccaccgctccctagtgtggtgggatggacacagcaggggaagaaccagacccaggtccagccgggtgcagactacgatctgatgcacaaaatgccctcccccagccccccccacgccgtgtcgtctgctgcccttccatctgacccagttcagagggctggctggcccctgccctgcacaccacccactcagccccatgacccgtcagagggaaagacagtgctacggagagaacccgcagacgttgctcctgtctcctggatccaggaagaggacccattggtgcctccaaagttagtacctgcggggcccacccnggatagcacatcacatccnccggcangcacctggcagtcacctgtannaccaagattntaccacctccagggtcttttctggctacaaagggatcacctggttgttanagacaaaaccatttttctgagtcg

SEQ ID NO: 215201 - DNA, 833 bp, Canis familiaris; identical to SEQ ID NO: 5094
  misc_feature (740)..(740): n is a, c, g, or t
  misc_feature (764)..(764): n is a, c, g, or t
  misc_feature (782)..(782): n is a, c, g, or t
  misc_feature (812)..(812): n is a, c, g, or t
  misc_feature (825)..(825): n is a, c, g, or t

SEQ ID NO: 215202 - DNA, 600 bp, Canis familiaris
  misc_feature (562)..(562): n is a, c, g, or t
  misc_feature (587)..(587): n is a, c, g, or t
  misc_feature (594)..(594): n is a, c, g, or t
gccaggcagaaagcagcgagaagcccaatgctgaggacatgacgtccaaagattactactttgattcctatgctcacttcggcattcacgaggagatgctgaaagatgaggtgcgcaccctcacctaccgaaactccatgtttcacaaccggcacctcttcaaagacaaggtggtgttggatgtgggctcgggcacagggatcctctgtatgtttgctgccaaggctggagcccgcaaggtcattgggatcgagtgttccagtatctctgattatgcggtgaagatcgtcaaagccaacaagttagaccatgtggtgaccatcatcaagggcaaggtggaggaagtagagcttccggtggagaaggtggacatcattatcagcgagtggatgggctactgccttttctacgagtcaatgctcaacaccgtgctctatgcccgagacaagtggctggcacctgatggcctcatcttcccggaccgagccacgctgtatgtgacagccatcgaagaccggcagtacaaagactacaagattcactggtgggaagaacgtgtacngctttgacatgtcctgcatcaaaanacgtggncatcaa

SEQ ID NO: 215203 - DNA, 214 bp, Canis familiaris; identical to SEQ ID NO: 5096
  misc_feature (172)..(172): n is a, c, g, or t
  misc_feature (197)..(197): n is a, c, g, or t

SEQ ID NO: 215204 - DNA, 600 bp, Canis familiaris
  misc_feature (396)..(396): n is a, c, g, or t
  misc_feature (400)..(400): n is a, c, g, or t
  misc_feature (459)..(459): n is a, c, g, or t
  misc_feature (475)..(475): n is a, c, g, or t
  misc_feature (499)..(499): n is a, c, g, or t
  misc_feature (566)..(566): n is a, c, g, or t
  misc_feature (580)..(580): n is a, c, g, or t
  misc_feature (590)..(590): n is a, c, g, or t
ggagagccgggctgggacagcctgctggggcctggcgctgagaggctgccattgcacagtacccccaaggatgggggctcagggccggggaaggccccctggccgggagactttgggaccacagcaaaggagagtagtggcaatggggcctccgaggagcgcccgtgggagaatggagatgccctgcctcgggaggggtcccttggccccctcccaggcccctctgcccaacctcacaaaggcatcctcaagaagaagtgtctgcccaccatcagtgagaagagcagccttttacggctacccctggagcaaggcacagggtcttctaggggctcctcagccagcgagggcagccggggcgggccccctccccgccctccaccccggcagagtctncagnagcagctgaatggggtcatgcccatcgccatgagcatcaaggcgggcacggtggatgangactcatcgggctccnaattttttttcttttaacttcctntattaaccctgggccggtggttcctacacccctgaggctccctttactttcccagctgcactcatgncccctactcctgtnttgtgccttnatcctgcccc

SEQ ID NO: 215205 - DNA, 600 bp, Canis familiaris
  misc_feature (524)..(524): n is a, c, g, or t
  misc_feature (584)..(584): n is a, c, g, or t
  misc_feature (593)..(593): n is a, c, g, or t
attactgtaatgacttaacatttgatatatgttttttaaaatgcagtggaagcctactttataaaaaagacttttttagaaccaaagaattgcatacttttagatagctaaagaacatcatgttgatcatgtacttttcagtgttttccattctttccatttttaaagtattgagtgttttcacattttttaagactaatagggaacatttctctatttgagaatagagtgttagggtaggaatgatgtctcagtgtatttgtactagaattttcatagtctaatagtcctttccgactattcagtaaattttcagactaagctatatctatatggtaataaatccagtcactgacaggaaaactacgagtgtactgaaaagaacctcccactcacttgggctaaacacttacagagtccccttctgatgtggaggagcacctaagggagtctgagccacctaagatctcaatttgccaaaatacgtttcttattaaccttattaattaataccactttcttangattttcacaatcttatcattttcattcctacagaaaaaaatctcagcaaaaacctgctnttacacgtnattttgg

SEQ ID NO: 215206 - DNA, 600 bp, Canis familiaris
  misc_feature (441)..(441): n is a, c, g, or t
  misc_feature (443)..(443): n is a, c, g, or t
  misc_feature (477)..(477): n is a, c, g, or t
  misc_feature (509)..(509): n is a, c, g, or t
  misc_feature (526)..(526): n is a, c, g, or t
  misc_feature (545)..(545): n is a, c, g, or t
  misc_feature (559)..(559): n is a, c, g, or t
  misc_feature (572)..(573): n is a, c, g, or t
  misc_feature (594)..(594): n is a, c, g, or t
  misc_feature (599)..(599): n is a, c, g, or t
cgacaagaagtacattaaaggctactaccgccgggccgccagcaacatggcactgggcaagttccgggccgccctgcgtgactatgagacggtggtgaaggtaaagccccacgacaaggatgccaaaatgaagtaccaggagtgcaacaaaatcgtgaagcagaaagccttcgagcgggccattgcaggcgatgagcacaagcgctccgttgtggactcgctggacattgagagcatgaccattgaggatgagtacagtgggcccaagctcgaggatggcaaagtgacaatcaccttcatgaaggagctcatgcagtggtacaaggaccagaagaaactgcaccggaaatgcgcctaccagatcctggtacaggtcaaagaggccctctccaagctgagcacgctcgtagagaccacactcaaagagacagagaagatacngngtgcggggacactcatggccagttctatgacctncttaacatatttgagctcaatggtttaccctnggagaccaacccttatntatttaatggcgactttgnggaccgcggcttcnttttccgtaaaanngatccttaaccttgtttgggntttanc

SEQ ID NO: 215207 - DNA, 235 bp, Canis familiaris; identical to SEQ ID NO: 5100

SEQ ID NO: 215208 - DNA, 280 bp, Canis familiaris; identical to SEQ ID NO: 5101
  misc_feature (4)..(4): n is a, c, g, or t
  misc_feature (24)..(24): n is a, c, g, or t
  misc_feature (53)..(53): n is a, c, g, or t
  misc_feature (90)..(90): n is a, c, g, or t
  misc_feature (137)..(137): n is a, c, g, or t
  misc_feature (145)..(145): n is a, c, g, or t
  misc_feature (149)..(149): n is a, c, g, or t
  misc_feature (172)..(172): n is a, c, g, or t
  misc_feature (176)..(176): n is a, c, g, or t
  misc_feature (231)..(231): n is a, c, g, or t
  misc_feature (241)..(241): n is a, c, g, or t

SEQ ID NO: 215209 - DNA, 600 bp, Canis familiaris
  misc_feature (405)..(405): n is a, c, g, or t
  misc_feature (455)..(455): n is a, c, g, or t
  misc_feature (519)..(519): n is a, c, g, or t
  misc_feature (525)..(525): n is a, c, g, or t
  misc_feature (552)..(552): n is a, c, g, or t
ttcttaggaaaattaatggccaaggctatcatggatttcagattggtggaccttccccttggtttacccttttataagtggatgctaaggcaagaaacttcactgacatcgcatgatttgtttgacattgacccagttgtagccagatcagtgtatcacctagaagacattgtcagacagaagaaaagacttgagcaagataaatcccagaccaaagagagtctacaatatgcattagaaaccctgactatgaatggctgctcagttgaagatctaggattggatttcacgctgccagggtttcccaacattgaactgaagaaagggaggaaaggatataccagttaccatccacaatttagaggagtatctaagactggttatattctgggcactaaatggaangcgtttccaggcaatttgattccttcagagatggatttgaatccgtcttnccacttagtcattcttcagtacttctaccccggaagaactgggatcagctcttgggcggcagtnaagcanacacgtgggatgcgaaaaccctggatngagtgctgcaggccggaccccggtttactcatggacagtcgggcttgg

SEQ ID NO: 215210 - DNA, 596 bp, Canis familiaris; identical to SEQ ID NO: 5103
  misc_feature (16)..(16): n is a, c, g, or t
  misc_feature (25)..(25): n is a, c, g, or t
  misc_feature (30)..(30): n is a, c, g, or t
  misc_feature (32)..(32): n is a, c, g, or t
  misc_feature (37)..(37): n is a, c, g, or t
  misc_feature (40)..(40): n is a, c, g, or t
  misc_feature (68)..(68): n is a, c, g, or t

SEQ ID NO: 215211 - DNA, 600 bp, Canis familiaris
  misc_feature (507)..(507): n is a, c, g, or t
  misc_feature (550)..(550): n is a, c, g, or t
  misc_feature (553)..(553): n is a, c, g, or t
  misc_feature (565)..(565): n is a, c, g, or t
  misc_feature (584)..(584): n is a, c, g, or t
  misc_feature (586)..(586): n is a, c, g, or t
gttttaaccctgaaacctgtttcagtagtaggggcggtaggtcattgcattaaactttctcttctaagtttccacccaggaagaggcccctcagaaccatcaaggggttacctcccgaataaacatgaagaggatcttagtggcacagcaggtggactgtaagtacatggagatacaccacccagcttcccctccaaagaaggacttgtttggggtgccaggagccatagtggctatccttcagctgtcacacccatccttcggtaagccacatccaataactggtcaaagtggaagtagaaagacctggctaatgcaatctaaaacgaacaactctgaagggccattttaacttcagagctccccacttctctgtctcctgaatcttgcctccatcacctcagtcctacaggtattaataccaaagaactccttaggaaacaccctacactctaagtttatctcaaagtctgctttttagagatcccaacttaagtaacacagctnctggtttgcttttgggccatggtagaaactgaacccctgcctntgnaaatactaagtnaacatgtggatctggcttntnactaactagggatc

SEQ ID NO: 215212 - DNA, 312 bp, Canis familiaris; identical to SEQ ID NO: 5105
  misc_feature (62)..(62): n is a, c, g, or t
  misc_feature (90)..(90): n is a, c, g, or t
  misc_feature (174)..(174): n is a, c, g, or t
  misc_feature (213)..(213): n is a, c, g, or t
  misc_feature (286)..(286): n is a, c, g, or t

SEQ ID NO: 215213 - DNA, 293 bp, Canis familiaris; identical to SEQ ID NO: 5106
  misc_feature (242)..(242): n is a, c, g, or t
  misc_feature (250)..(250): n is a, c, g, or t
  misc_feature (266)..(266): n is a, c, g, or t
  misc_feature (281)..(281): n is a, c, g, or t

SEQ ID NO: 215214 - DNA, 539 bp, Canis familiaris; identical to SEQ ID NO: 5107
  misc_feature (16)..(16): n is a, c, g, or t
  misc_feature (25)..(25): n is a, c, g, or t
  misc_feature (32)..(32): n is a, c, g, or t
  misc_feature (37)..(37): n is a, c, g, or t
  misc_feature (41)..(41): n is a, c, g, or t
  misc_feature (69)..(69): n is a, c, g, or t
  misc_feature (506)..(506): n is a, c, g, or t

SEQ ID NO: 215215 - DNA, 600 bp, Canis familiaris
  misc_feature (536)..(536): n is a, c, g, or t
  misc_feature (567)..(567): n is a, c, g, or t
ccctctgaaactaatagtatactgtatgttaattgaatttaaattttaaaaatagtaaaaaaaaaatagtctccacttatatgtgttcagtgattaagatatcactttggagactttctgatctagttagtacatacacaattttgagttttaaaattctgaattttggggtattaaaaagaaaatgaacacttttggttcaagatggcagactaaattcagcatttatctgctttccctccaataaaatcccattggcaataaagaaatgttttaaaaatggaataagttgctaaaaccacaaaaacaggagtgggacaatcagaggattgaaggttttgaaaagagaatggaagttggattggaaagcagaatggatcataccaaagactaatccttaacagaggaagccaaacacctcaaaagcattttgaaataagagaaggttgtagcacagatgggaaccctttttggtttggtttggtttacaatgaagtcccctgtgattggctgatatggagagcaagagtgagaangggaagaaaaatcaagatatttgactggaanaattaacctgtaggtgggctgcagggatagggg

SEQ ID NO: 215216 - DNA, 416 bp, Canis familiaris; identical to SEQ ID NO: 5109

SEQ ID NO: 215217 - DNA, 303 bp, Canis familiaris; identical to SEQ ID NO: 5110
  misc_feature (14)..(14): n is a, c, g, or t
  misc_feature (30)..(30): n is a, c, g, or t
  misc_feature (39)..(39): n is a, c, g, or t
  misc_feature (54)..(54): n is a, c, g, or t
  misc_feature (59)..(59): n is a, c, g, or t
  misc_feature (73)..(73): n is a, c, g, or t
  misc_feature (94)..(94): n is a, c, g, or t
  misc_feature (163)..(163): n is a, c, g, or t
  misc_feature (174)..(174): n is a, c, g, or t
  misc_feature (208)..(208): n is a, c, g, or t
  misc_feature (234)..(234): n is a, c, g, or t
  misc_feature (242)..(242): n is a, c, g, or t
  misc_feature (268)..(268): n is a, c, g, or t

SEQ ID NO: 215218 - DNA, 600 bp, Canis familiaris
  misc_feature (297)..(297): n is a, c, g, or t
  misc_feature (319)..(319): n is a, c, g, or t
  misc_feature (338)..(338): n is a, c, g, or t
  misc_feature (344)..(344): n is a, c, g, or t
  misc_feature (349)..(349): n is a, c, g, or t
  misc_feature (392)..(392): n is a, c, g, or t
  misc_feature (411)..(411): n is a, c, g, or t
  misc_feature (446)..(446): n is a, c, g, or t
  misc_feature (555)..(555): n is a, c, g, or t
  misc_feature (561)..(561): n is a, c, g, or t
  misc_feature (590)..(590): n is a, c, g, or t
  misc_feature (599)..(599): n is a, c, g, or t
tctcatggtcgtgaaatcaagccctgcatcaggctctacactcagtgtggagtctgcttgggattctcattccttctctctctgcccatcctgcttatgcgttctctctctctctctctctctaaaataaataaatcttaaaaaaataaacatttattgtactgatttattttttatatttcagtgggttgatttcagtgctcaatcaataggaaaataaaaatgtagtcaggctttgaaatttacaatgcatggaaactcagtcaagttttgaattcaagggttaaacccatttgntattgggaaggcagtttttttnaggaccaaagggttttgcnttgaanaaatnaaggcccaaatccctcttggaatgttcattctgaattcatcanatgaagatccattaattgnaaattattttccagtttcagggatgcatcaaaganaacaaacccatcttaaagctaaggatccctatgcagcacttaccaataaatggatttaacatctttcttctatgttattccttttctggaccaaaattgggtatgtaanaatttncataacttcaaaaatatttacaagaaganaccaaaaang

SEQ ID NO: 215219 - DNA, 462 bp, Canis familiaris; identical to SEQ ID NO: 5112
  misc_feature (365)..(365): n is a, c, g, or t
  misc_feature (421)..(421): n is a, c, g, or t

SEQ ID NO: 215220 - DNA, 552 bp, Canis familiaris; identical to SEQ ID NO: 5113
  misc_feature (315)..(315): n is a, c, g, or t
  misc_feature (321)..(321): n is a, c, g, or t
  misc_feature (383)..(383): n is a, c, g, or t
  misc_feature (394)..(394): n is a, c, g, or t
  misc_feature (396)..(396): n is a, c, g, or t
  misc_feature (414)..(414): n is a, c, g, or t
  misc_feature (490)..(490): n is a, c, g, or t
  misc_feature (505)..(505): n is a, c, g, or t
  misc_feature (535)..(535): n is a, c, g, or t

SEQ ID NO: 215221 - DNA, 519 bp, Canis familiaris; identical to SEQ ID NO: 5114
  misc_feature (363)..(363): n is a, c, g, or t
  misc_feature (417)..(417): n is a, c, g, or t
  misc_feature (420)..(420): n is a, c, g, or t
  misc_feature (428)..(428): n is a, c, g, or t
  misc_feature (486)..(486): n is a, c, g, or t
  misc_feature (492)..(492): n is a, c, g, or t
  misc_feature (510)..(510): n is a, c, g, or t

SEQ ID NO: 215222 - DNA, 600 bp, Canis familiaris
  misc_feature (315)..(315): n is a, c, g, or t
  misc_feature (330)..(330): n is a, c, g, or t
  misc_feature (348)..(348): n is a, c, g, or t
  misc_feature (354)..(354): n is a, c, g, or t
  misc_feature (397)..(397): n is a, c, g, or t
  misc_feature (465)..(465): n is a, c, g, or t
  misc_feature (487)..(487): n is a, c, g, or t
  misc_feature (502)..(502): n is a, c, g, or t
  misc_feature (507)..(507): n is a, c, g, or t
  misc_feature (533)..(533): n is a, c, g, or t
  misc_feature (564)..(564): n is a, c, g, or t
  misc_feature (571)..(571): n is a, c, g, or t
  misc_feature (597)..(597): n is a, c, g, or t
aagatgagaaaaaatcaagatatagtaaacaaaagaaagaaaaagaaaaaaaaaatgaattatacgtgtgccatcccaaagaaaacagaaaaagaagacttgagatttcctgaactaacccaaagagctgagtttatttactgatagtttttattgggtctgtactaaattaatggaaattattagtaataagacatatcctttaaaattttttattttattctttttcatttttttaaaatttttatttatttatgatagtcagagagagagagaggcggagacacaagcagagggagaaacaagcttccttgnccgggggcctgccgngggatttgattccgggtntccagnatcgcgccctggccaaaggcaggcgccaaccgttggcccccanggatcccctttaaaaattttaaagtccccaaatcttggaaggggcgtcacaaaatatttcaggcaganccaagatgcagaaaaaaatggnagactctaagttcanaaggnggttattgcccacaaatttccaaggnttattttaacctgtggtcagttgaaacaaanggagaangtcttttccataaagcttttccactnaag

SEQ ID NO: 215223 - DNA, 600 bp, Canis familiaris
  misc_feature (267)..(267): n is a, c, g, or t
  misc_feature (321)..(321): n is a, c, g, or t
  misc_feature (356)..(356): n is a, c, g, or t
  misc_feature (361)..(361): n is a, c, g, or t
  misc_feature (367)..(367): n is a, c, g, or t
  misc_feature (438)..(438): n is a, c, g, or t
  misc_feature (457)..(457): n is a, c, g, or t
  misc_feature (524)..(524): n is a, c, g, or t
  misc_feature (586)..(586): n is a, c, g, or t
  misc_feature (598)..(598): n is a, c, g, or t
gccgccaacagtagtgaggcggggagagcagaatgctcaggtagacgtgtctgtttttctaagccatggggctgcctcctaatggcttcccaaagagcaagtgcccgagtggaggcacctgcagtttgcccaccccaccccacaggccccttccttgggccccctggggtgcccggagcaccaagggagcccatccttcatgtttcaatagctgttgttttgtttttcatttgggatggagtgggggaagggccgagcggaccccanggacccccgagttcttgcagacaagcccgtgtggtgtgcgcaaactgtacttancttgacccccaaacttcggccgaaggataattaangaggnttgaanccacaagggctgacccgtcctttgccttgggaaccagttaagggactttaattgaatttcctttttgtggnggctttttgtggtttttgnggtggtggttttctctttaaggaattatgaactaaaaaagtttttgctttggggttgatggaaaaantttactgataactatggctaacttattgatatgggttttccccctttaaattgacttggganaaaatatttganct

SEQ ID NO: 215224 - DNA, 600 bp, Canis familiaris
  misc_feature (360)..(360): n is a, c, g, or t
  misc_feature (366)..(366): n is a, c, g, or t
  misc_feature (380)..(380): n is a, c, g, or t
  misc_feature (389)..(389): n is a, c, g, or t
  misc_feature (439)..(439): n is a, c, g, or t
  misc_feature (442)..(442): n is a, c, g, or t
  misc_feature (448)..(448): n is a, c, g, or t
  misc_feature (472)..(472): n is a, c, g, or t
  misc_feature (498)..(498): n is a, c, g, or t
  misc_feature (501)..(501): n is a, c, g, or t
  misc_feature (522)..(522): n is a, c, g, or t
  misc_feature (524)..(524): n is a, c, g, or t
  misc_feature (570)..(571): n is a, c, g, or t
  misc_feature (596)..(596): n is a, c, g, or t
accccatcgagcacggcatcgtcaccaactgggacgacatggagaagatctggcaccacaccttctacaacgagctgcgcgtggcccccgaggagcaccccgtgctgctgaccgaggcccccctgaaccccaaagccaaccgtgagaagatgactcagatcatgttcgagacgttcaacaccccagccatgtatgtggccatccaggctgtgctgtccctgtacgcctctggccgcaccactggtattgtcatggactctggggatggcgtcacccacactgtgcccatctacgaggggtacgccttgcccacccattcttgcggtttgaacttgcttggccggacctgattgactactnatgaanatcctacggagcgngggtacagnttaccaccactgttgacggggagatcgtgcgtgacatcaaggagaagctntgntacgtngcctggatttcaacaggaaatggncacggccgggtcttgtcttcctgganaanagtacaacttgcccacggcangngatacaattggaacagcggttccgttgcaaaggactttcagctttnnttctggttggagtctgggatcaaanaaca

SEQ ID NO: 215225 - DNA, 600 bp, Canis familiaris
  misc_feature (388)..(388): n is a, c, g, or t
  misc_feature (443)..(443): n is a, c, g, or t
  misc_feature (470)..(470): n is a, c, g, or t
  misc_feature (481)..(481): n is a, c, g, or t
  misc_feature (502)..(502): n is a, c, g, or t
  misc_feature (526)..(526): n is a, c, g, or t
  misc_feature (567)..(567): n is a, c, g, or t
  misc_feature (572)..(572): n is a, c, g, or t
tgtttactgagcacactccctcctcctctcactgaagtgtagagacctagaaagtgtgctcagttaacccaccagcatctattgagcagtgtttactgtagtaattttgcatacatttttctttgtttaagggaacaaatttaagtaggtagtgtgaaatattttgctaatcctatagagaaggggaaaactattaaaaggaaaagaaatgtaacagttaccttttttcttaatgtcagggcagatgttacagttgaaagaagaaaagtgaaaggctcttaatctagtaaagttagttctggggtgggcaaatgtgtgtgaggcacaagaaatgctgatgactttttcaatggctggaaacttgttcaaagggtttttagccttattntaaaacaggaggaggctgttttgcaagactaggatgggaacagactctgaaaaangtttgggttaaccccaaaacgaatganaaacttgttgncaggggcccaggtcctcattntgtttacagaaaggagtcttggtntaatgggtgaaggaaaggtaacaaaaaacctaaaagctctnctatncatgaaagggcttgcagaaaaagaaact

SEQ ID NO: 215226 - DNA, 600 bp, Canis familiaris
  misc_feature (412)..(412): n is a, c, g, or t
  misc_feature (448)..(448): n is a, c, g, or t
  misc_feature (509)..(509): n is a, c, g, or t
  misc_feature (535)..(535): n is a, c, g, or t
  misc_feature (555)..(555): n is a, c, g, or t
  misc_feature (558)..(558): n is a, c, g, or t
  misc_feature (573)..(573): n is a, c, g, or t
  misc_feature (590)..(590): n is a, c, g, or t
  misc_feature (598)..(598): n is a, c, g, or t
gctatgtctgcaaacatgcagaggaaaaatacactaatggaagcagcatgattcttcattatggacccctccaggtcttgaaaatcatccaaggagctatctcatcaaaagttgaaaatcttccaaggatcccttcacacacaccctttttaagtgattgggccatgaactgaggcactgtggtaaagcaaatcgtctaagatgacacatcgcttaccttgtggttccaggattcattgacattttgactccagaactcatgtagttaaacacatcattgtctttttactcaacatataatacaaagaaattcctctattaatgttttaatcattgaagtaatatacaaaacataatgggaacattacacatctattggggattggaaataataaaacttttaatattacanggaatattgaactagttttggtcaaagccaagtttntttccaatacccactgttgtctaatctacatccataaagagttcctagtcacagcaaaggngtatccaaagcttaatgggacataangtctcagggttacttaaganttnttcataataccactnctgtaaaattaccttanggtttatngg

SEQ ID NO: 215227 - DNA, 600 bp, Canis familiaris
  misc_feature (335)..(335): n is a, c, g, or t
  misc_feature (346)..(346): n is a, c, g, or t
  misc_feature (356)..(356): n is a, c, g, or t
  misc_feature (400)..(400): n is a, c, g, or t
  misc_feature (447)..(447): n is a, c, g, or t
  misc_feature (505)..(505): n is a, c, g, or t
  misc_feature (511)..(511): n is a, c, g, or t
  misc_feature (539)..(539): n is a, c, g, or t
  misc_feature (541)..(541): n is a, c, g, or t
  misc_feature (554)..(554): n is a, c, g, or t
  misc_feature (585)..(585): n is a, c, g, or t
tgatgatgacacgtcacgcatggaagaagtcgattaagtgctgccctgagaattacttgtatatgtattcaatactttatcttcattccctctgataatatattttcaaggatgtttttctttatttttgttaacattttaagaatctgtaaggcatgacaatatagctacttaaggggaagataagatttctttttgtttgagtgtgatactgtgacgtgtaggaactaaagctcagctagtttttctttcctagtcccatgctggcttattttaaccggacaaggtaacctatgttgtaaggtgtaccgtaacctaatggtagcccgtgtggnctcaaagtggnggattccgantaagaccaagggtttttttgcacttgaggggttcttgagctgtnccttgatgtgtaaaaaaaaaaaactggttaaaacaactttcaccttntaggactactttttaaatctttgtcccttgtggttttaactgatgtaccagcctttanaactantagtgaactgaccactggatgggagtancntggatagggttgntttcaaaaaaacgtgttaagacgagattaanctttagggggtggaa

SEQ ID NO: 215228 - DNA, 600 bp, Canis familiaris
  misc_feature (173)..(173): n is a, c, g, or t
  misc_feature (347)..(347): n is a, c, g, or t
  misc_feature (488)..(488): n is a, c, g, or t
  misc_feature (500)..(500): n is a, c, g, or t
  misc_feature (516)..(516): n is a, c, g, or t
  misc_feature (533)..(533): n is a, c, g, or t
  misc_feature (555)..(555): n is a, c, g, or t
  misc_feature (559)..(559): n is a, c, g, or t
  misc_feature (570)..(570): n is a, c, g, or t
  misc_feature (592)..(592): n is a, c, g, or t
ttacggatgaccatgttcagttccttatctaccaaattctccgaggtctcaagtatatacattcagctgacataattcacagggacctaaaacctagcaatctagctgtgaatgaagactgtgagctgaagatcttggactttggactggcccgacatacagatgatgaaatnacaggctatgtggctaccaggtggtacagggctcctgagataatgctgaactggatgcattacaaccagacagttgatatttggtcagtgggatgcataatggccgaactgttgactggaagaacgttgtttctggtacagaccatattaaccagctttagcagaatatgcgtntgaccggggaccccccctgcttatttaattacaggatgccaagccatgaggcaagaaactacattcagctttgacccaaatgccgaaaagaactttgcaaatgtattatggtgccaatcccttgctgtcgacttgctgganaaaaagcttgtnttggctcaaacaaganaatacaggaggccaagncctcgacatgcctactttggtnaatnccatgaccaangatgaccagggtgatcctacancagccttg

SEQ ID NO: 215229 - DNA, 600 bp, Canis familiaris
  misc_feature (350)..(350): n is a, c, g, or t
  misc_feature (356)..(356): n is a, c, g, or t
  misc_feature (387)..(387): n is a, c, g, or t
  misc_feature (461)..(461): n is a, c, g, or t
  misc_feature (463)..(463): n is a, c, g, or t
  misc_feature (483)..(483): n is a, c, g, or t
  misc_feature (512)..(512): n is a, c, g, or t
  misc_feature (527)..(527): n is a, c, g, or t
  misc_feature (565)..(565): n is a, c, g, or t
  misc_feature (581)..(581): n is a, c, g, or t
ctatatggtacaactaatgctagacctacagtttatgtatacagttgagtttgatgtatttataaaagctttttttttttctagatttgacatttttcctgtatcattttactgtatttttgcatggttccttgtattgcatttctttgcacatattatgggcttgtgaccctaaacttgcaggcaagattagctgctttagtaagtagaattttgtggtctttttgttttttacatagtaccaggtcttgagaattatgaatttttttatccattactaacctttaatttaatcaatcatgtactttagtttaatgtataaagaacctctaaaaaatggataaaattgnggattnaaaacattcctaaataaggacaaaagggtgntggatattacaaaatggagtctgagttaaaaccatccttaaactggaacagaatacaaccatattcaatcagancngggggtttccatcacccggngatcaatagaaatttttggggatcctttnctttaacacaagcanatgaggggaatatggtatcatacattaaaccgggggcngatggattatcttttnctacatcgtaaaacttatt

SEQ ID NO: 215230 - DNA, 536 bp, Canis familiaris; identical to SEQ ID NO: 5123
  misc_feature (404)..(404): n is a, c, g, or t
  misc_feature (421)..(421): n is a, c, g, or t

SEQ ID NO: 215231 - DNA, 600 bp, Canis familiaris
  misc_feature (325)..(325): n is a, c, g, or t
  misc_feature (331)..(331): n is a, c, g, or t
  misc_feature (425)..(425): n is a, c, g, or t
  misc_feature (481)..(481): n is a, c, g, or t
  misc_feature (578)..(578): n is a, c, g, or t
  misc_feature (596)..(596): n is a, c, g, or t
ggtggtgcgattgcaccctgggaatcagagaaccagggtagtggaggagagagaagagtctgtttcaggataacagagcagtaatggatgagtgcttgctagaaacctggtgctgtgcacattatcctggcctccagccttggcttaagaagtagatttgatcatcaccaaagtgggcagagagcaagagtaaggataatctacacaacacatcttttggcaaattcagggcctggatatacatttgcaatgagtaatatgagacaatgcagctgcatcaacagaactttgaggggaaatggtagaatctacatatttgattttnaactgnctttaatgtgtgaaagcaacagaaagacaattttcagatataaaaaggttctggaaatatctcactggtgaaagagttatttgaagatgttctncatctgattgagagaagatccaatattagaaacttaacaccaaagaagttatggtntagagaaactgggatgaacacatcaagcaattaaatataatattaaatccaaataatcctttaaaccttgttttaaaatagatggatattgtcatanttgtacaaaagtacattntatg

SEQ ID NO: 215232 - DNA, 600 bp, Canis familiaris
  misc_feature (324)..(324): n is a, c, g, or t
  misc_feature (408)..(408): n is a, c, g, or t
  misc_feature (412)..(412): n is a, c, g, or t
  misc_feature (468)..(468): n is a, c, g, or t
  misc_feature (510)..(510): n is a, c, g, or t
  misc_feature (549)..(549): n is a, c, g, or t
  misc_feature (551)..(551): n is a, c, g, or t
cctgggcaaataacttaagagaaaaagtggaaagaagacatcttgggatctgctgacactgaggatatttactgtcaacagactttttgccaaaagaactatagaaccttatggatcaactagaaggaacttgaacccagatgcaagtgtgagaggcaagaatccatgtgagcagagaaatgggcaactattttggtatatctaaataagcattaattgtaaaaaaaagtgagtattaaaatgtcacactgtatgtttaaatatatctactaaacgacactgtgacgggtttggagcatgtgctttactcttacagaatggttnaggttgccggctttggcttttaggacgagtgaggacaaaaagcccccaaactcctgccccttaagctgccttggtgattgccgnttanagattgtgggtgtggtgccccccggatcgcagtatggaaaattggaagggacaaangtcagagatatgtgacgtacctttcaggtttctaacattttnaaacccacaggcatgcccaggcttccgggtgttgcgcananctggaagacgccctcttgggtcggaagccggcattggcactccttaacc

SEQ ID NO: 215233 - DNA, 408 bp, Canis familiaris; identical to SEQ ID NO: 5126
  misc_feature (363)..(363): n is a, c, g, or t
  misc_feature (392)..(392): n is a, c, g, or t

SEQ ID NO: 215234 - DNA, 563 bp, Canis familiaris; identical to SEQ ID NO: 5127
  misc_feature (375)..(375): n is a, c, g, or t
  misc_feature (392)..(392): n is a, c, g, or t
  misc_feature (415)..(415): n is a, c, g, or t
  misc_feature (439)..(439): n is a, c, g, or t
  misc_feature (441)..(441): n is a, c, g, or t
  misc_feature (462)..(462): n is a, c, g, or t

SEQ ID NO: 215235 - DNA, 600 bp, Canis familiaris
  misc_feature (333)..(333): n is a, c, g, or t
  misc_feature (347)..(347): n is a, c, g, or t
  misc_feature (357)..(357): n is a, c, g, or t
  misc_feature (382)..(382): n is a, c, g, or t
  misc_feature (433)..(433): n is a, c, g, or t
  misc_feature (464)..(464): n is a, c, g, or t
  misc_feature (537)..(537): n is a, c, g, or t
  misc_feature (549)..(549): n is a, c, g, or t
  misc_feature (563)..(563): n is a, c, g, or t
  misc_feature (575)..(575): n is a, c, g, or t
  misc_feature (589)..(589): n is a, c, g, or t
agatggtccgcccaaccctggagaagacacttagtgtcctccagctagattatgtggatctttacatcattgaaatacccatggctttcaaggtgagctcagatgcctaaagataggtctctgctcttagacaaccatgagccagcagttgtgtgtgaagctatgaagctagttcattatttatcaccatagaggtgataaaggtgttaaggtgttctgttattataaatcagatagtactgaccaatcccaacaaatgcctgtagagattatatataacagactcagacctggaaccctagtttttgattcataatccaatggacctgctantatatcttggcttnactatagttnaaactcttccccaccaaaccaacgngtagtcccccactatctctacatttagttacctggcattagaccatctttnttctgtttacaaagcatgaaaatgtcctgcngacatatgcaacataatatatgcactgaaacttgttatcttcacccctccaaaaagaaaaacccaaagaaaancaggtttttggncttgatccaagggnggggttatgaanactactccttagtnaaatactactt

SEQ ID NO: 215236 - DNA, 567 bp, Canis familiaris; identical to SEQ ID NO: 5129
  misc_feature (379)..(380): n is a, c, g, or t
  misc_feature (456)..(456): n is a, c, g, or t
  misc_feature (475)..(475): n is a, c, g, or t
  misc_feature (479)..(479): n is a, c, g, or t
  misc_feature (521)..(521): n is a, c, g, or t
  misc_feature (523)..(523): n is a, c, g, or t

SEQ ID NO: 215237 - DNA, 600 bp, Canis familiaris
  misc_feature (484)..(484): n is a, c, g, or t
  misc_feature (541)..(541): n is a, c, g, or t
  misc_feature (551)..(551): n is a, c, g, or t
  misc_feature (554)..(554): n is a, c, g, or t
attgccaagtatttgccaaaaggaggcactttttatttaaaatttgagactaacgagatctcaacaatcagtcccaaaaaggtattatccacttaaggttataattttcacaaagatgtagatatttctctattgttttcatgtaaaatagtatagatttgttttgttggtttaagaataatacatatttagtagtaatacggagtttcttcctaagtgcagattcgtttccttctctcttgcttgcagtagaaacacagcgtgataggtgtttctcttcttattttcatggtcacattatgtcttagcatctcactttatgaaaacaaggagaaagataccaacctacagagccccgcttactaaaagcgctagctttaaaaaaaaaaaaatttggcaatcggggggccattcgggattgcctttaatgtggtttttaaaatgaaaccatgatgccttgtattgctgttgcacccctgaaatnaattccgatatgtttgaagccatcattttgccatgactggcataggaggcatacggntttttatggngcncattatataaactttgtcataaggcagatggaacccccggaaacgt

SEQ ID NO: 215238 - DNA, 377 bp, Canis familiaris; identical to SEQ ID NO: 5131
  misc_feature (354)..(354): n is a, c, g, or t

SEQ ID NO: 215239 - DNA, 359 bp, Canis familiaris; identical to SEQ ID NO: 5132

SEQ ID NO: 215240 - DNA, 600 bp, Canis familiaris
  misc_feature (333)..(333): n is a, c, g, or t
  misc_feature (346)..(346): n is a, c, g, or t
  misc_feature (358)..(358): n is a, c, g, or t
  misc_feature (369)..(369): n is a, c, g, or t
  misc_feature (378)..(378): n is a, c, g, or t
  misc_feature (386)..(386): n is a, c, g, or t
  misc_feature (396)..(396): n is a, c, g, or t
  misc_feature (452)..(452): n is a, c, g, or t
  misc_feature (503)..(503): n is a, c, g, or t
  misc_feature (506)..(506): n is a, c, g, or t
  misc_feature (535)..(535): n is a, c, g, or t
  misc_feature (548)..(548): n is a, c, g, or t
  misc_feature (558)..(558): n is a, c, g, or t
  misc_feature (571)..(571): n is a, c, g, or t
  misc_feature (588)..(589): n is a, c, g, or t
ctgcccccaaggccagcatcagcctgtgggctgccccctgcccccaccttggccacccatctgggctgtctctgcggggcggagccatccagacctgggagggggaagctgctggcatcatccccacccccgaggctggggcaggcagtgttccgttgaagcagaactccagcctggcttgcccccactccgggcccttcatcacaccccggtgcccctctggactcatggggagcaaggtgggaggggaggtttgagatatctcagtgcgtacagagcctaccgtggaggcagtgaagatgtgaaaatggtggaatgaacacttggcttggnaatcctaatcctnggcttccaattnggtttttgttntgtgaccgnggcaagtnattgtccctntttgggcacctttgttgcaaatggacgaaaatatttaagaggtcgctgaaaatggngattcatgccctgccccaaatgggagggtttcttctaagggggcccattgncanccttgtttttggttcctgggctggcttangggctggacttgntttcccgtanccctggggacctnaattacaaaactgccanncttttattgtt

SEQ ID NO: 215241 - DNA, 563 bp, Canis familiaris; identical to SEQ ID NO: 5134
  misc_feature (338)..(338): n is a, c, g, or t
  misc_feature (443)..(443): n is a, c, g, or t
  misc_feature (447)..(447): n is a, c, g, or t
  misc_feature (457)..(457): n is a, c, g, or t
  misc_feature (521)..(521): n is a, c, g, or t
  misc_feature (551)..(551): n is a, c, g, or t

SEQ ID NO: 215242 - DNA, 600 bp, Canis familiaris
  misc_feature (404)..(404): n is a, c, g, or t
  misc_feature (422)..(422): n is a, c, g, or t
  misc_feature (444)..(444): n is a, c, g, or t
  misc_feature (538)..(539): n is a, c, g, or t
  misc_feature (567)..(567): n is a, c, g, or t
  misc_feature (598)..(598): n is a, c, g, or t
aaattgttaaccacgcttttgctccaggatgtgtgagggccattcaggggctgcagggccgtagatagtcacacaaacaagcgtgtgtatatctggagccccacacattgtaataaacacagctgcatttatttgagtatgtgatcccatgtacatgtaaaaacattcaaacaaacacactcaacagatttatttgattgtgcaatggggcaattattcaaataaacatgctcggtgcaattatttgaatctcacattgcatgttcatcaatcaacagcactaaaaaaactaaaaaaaggggggggtgtggaaacaccaaagaatttatgtggggaaaaaaaatatatgtgaaaacaccttattatagattttataggggtagcccaaagttatggctccttcntaactgtactaactattntgtatttaatgacatttgtttntaatgatggtcgattcaattattccttggtcatacattgggatggccccaaccttcaaatcatttaataatgactttccaacctgattgggttnnaaagtgaatttttttttgaaggccgaanaatttttctaggtttttactcaagggacctntt

SEQ ID NO: 215243 - DNA, 600 bp, Canis familiaris
  misc_feature (291)..(291): n is a, c, g, or t
  misc_feature (330)..(330): n is a, c, g, or t
  misc_feature (353)..(353): n is a, c, g, or t
  misc_feature (357)..(357): n is a, c, g, or t
  misc_feature (367)..(367): n is a, c, g, or t
  misc_feature (382)..(382): n is a, c, g, or t
  misc_feature (399)..(399): n is a, c, g, or t
  misc_feature (410)..(410): n is a, c, g, or t
  misc_feature (413)..(413): n is a, c, g, or t
  misc_feature (451)..(451): n is a, c, g, or t
  misc_feature (467)..(467): n is a, c, g, or t
  misc_feature (475)..(475): n is a, c, g, or t
  misc_feature (503)..(503): n is a, c, g, or t
  misc_feature (563)..(563): n is a, c, g, or t
  misc_feature (565)..(565): n is a, c, g, or t
  misc_feature (577)..(577): n is a, c, g, or t
ccgaaagctgggtctgaggcagtgccttgtaactcacaatgggcgcctccttggcattataacaaaaaaagatatcctccgtcatatggcccagacggcaaaccaagaccccgcttcaataatgttcaactgaatcctatagatgagagagaggaaacagaagaggaagttcatttgttgaatagcacaactctttaacttgagggagtcgtctacttttttttctccttaaaaaatctaaaagccgggctttttgcaacatagtttgcaaatactgctggtggaatgaangagttgtttggggagggaaaggagcgagaaagaaatgantgaggggttttccccatttactngaancacctggccngtaattccactttgnaaaaaccaattaccagnccttatttttnggngggataactttgaattgggcccttttttaaaactgcangggcttgccctttttntaaaaacngtctggttaattcatgaattatttagtnaagattggcttttacattccaaaaaagcttttttttttttttccctcctttttttttttntntttgggctgaanaaaccttttaatgggggcccttt

SEQ ID NO: 215244 - DNA, 412 bp, Canis familiaris; identical to SEQ ID NO: 5137

SEQ ID NO: 215245 - DNA, 557 bp, Canis familiaris; identical to SEQ ID NO: 5138
  misc_feature (506)..(506): n is a, c, g, or t
  misc_feature (520)..(520): n is a, c, g, or t
  misc_feature (527)..(527): n is a, c, g, or t

SEQ ID NO: 215246 - DNA, 499 bp, Canis familiaris; identical to SEQ ID NO: 5139
  misc_feature (190)..(190): n is a, c, g, or t
  misc_feature (227)..(227): n is a, c, g, or t
  misc_feature (328)..(328): n is a, c, g, or t
  misc_feature (428)..(428): n is a, c, g, or t
  misc_feature (495)..(495): n is a, c, g, or t

SEQ ID NO: 215247 - DNA, 600 bp, Canis familiaris
  misc_feature (283)..(283): n is a, c, g, or t
  misc_feature (290)..(290): n is a, c, g, or t
  misc_feature (312)..(312): n is a, c, g, or t
  misc_feature (323)..(323): n is a, c, g, or t
  misc_feature (337)..(337): n is a, c, g, or t
  misc_feature (358)..(358): n is a, c, g, or t
  misc_feature (421)..(421): n is a, c, g, or t
  misc_feature (438)..(438): n is a, c, g, or t
  misc_feature (453)..(453): n is a, c, g, or t
  misc_feature (458)..(458): n is a, c, g, or t
  misc_feature (517)..(517): n is a, c, g, or t
  misc_feature (548)..(548): n is a, c, g, or t
  misc_feature (553)..(553): n is a, c, g, or t
  misc_feature (563)..(563): n is a, c, g, or t
  misc_feature (597)..(597): n is a, c, g, or t
  misc_feature (599)..(599): n is a, c, g, or t
gataaactgtgagccttgcttaccctcacacctgagggagagaggcggcaagtcttaacaaaccaacatctttgagaaaagataaacctggagatattataagaaagagctgagccagttgtcctatggacaacttatttaaaaatatttcagatatcaaaattctagctgtatgatttgttttgaattttgtttttattttcaagagagcaagtggatgggaatttgtcagagttctgccaggcaaattcactgtttcactgaagcatttggattctcttanctactgnatccaaagtccattttatttgngcggtttttcnagtaagggtttggnaataacttttttttttaatanaaagaattcctaaattccttcccttttccccatttaggaatttaaaattaagtggaacaaaanccccccgccctgttagngagagttgcactatntatgncatgggatcaattttctttaacttgaagcaatcgtgacatcggcagtgtttggttaaanactgtcacagaaacatgatgggaaaaattcngctgngggtcttttnaaagggaattttatttttttaatatttaaaaatnanc

SEQ ID NO: 215248 - DNA, 538 bp, Canis familiaris; identical to SEQ ID NO: 5141
  misc_feature (392)..(392): n is a, c, g, or t
  misc_feature (467)..(467): n is a, c, g, or t
  misc_feature (485)..(485): n is a, c, g, or t
  misc_feature (518)..(518): n is a, c, g, or t

SEQ ID NO: 215249 - DNA, 466 bp, Canis familiaris; identical to SEQ ID NO: 5142
  misc_feature (61)..(61): n is a, c, g, or t
  misc_feature (344)..(344): n is a, c, g, or t
  misc_feature (426)..(426): n is a, c, g, or t
  misc_feature (452)..(452): n is a, c, g, or t

SEQ ID NO: 215250 - DNA, 600 bp, Canis familiaris
  misc_feature (439)..(439): n is a, c, g, or t
  misc_feature (457)..(457): n is a, c, g, or t
  misc_feature (495)..(495): n is a, c, g, or t
  misc_feature (498)..(498): n is a, c, g, or t
  misc_feature (574)..(574): n is a, c, g, or t
  misc_feature (583)..(583): n is a, c, g, or t
cggagacccgacccaagggaccggcaactataacatcgaggacttcgcggacctcggcatgttcccgccgttctctgagtagcggcaggcagagtgcagccggcgctgggcagggctgtgacgcgtgctgtgacggcgccacccgccccgctggcagaaggcaccgcacccccgcgctgcccccggcgcagcatcgtgcagcccacaaccagggctgctcggccaccaacgaggagccctggtagacattgggggggccgttgtatttattgtacttttttctgtgtacgcagggaggtgagcccgtggggcccatgaggtctggttgtgaataatctcctagtagacgacgttcacctataaaaagtccagttacggtcccgagtgcccagacctgcctgggacacgggaatcgggtttcttcttgcctttacgcttnggacgggtaagggcttcnggtgcttggaaaggggggcgaacaaggacgtgctcttncancaagaggacacggggacccaaagtggaccttggttttcttggcccaactaaacaaaattttgtgtttgtacctctnctgtggganatgtttcttttttgaat

SEQ ID NO: 215251 - DNA, 422 bp, Canis familiaris; identical to SEQ ID NO: 5144
  misc_feature (380)..(380): n is a, c, g, or t
  misc_feature (387)..(387): n is a, c, g, or t
  misc_feature (411)..(411): n is a, c, g, or t

SEQ ID NO: 215252 - DNA, 600 bp, Canis familiaris
  misc_feature (218)..(218): n is a, c, g, or t
  misc_feature (276)..(276): n is a, c, g, or t
  misc_feature (382)..(382): n is a, c, g, or t
  misc_feature (421)..(421): n is a, c, g, or t
  misc_feature (443)..(444): n is a, c, g, or t
  misc_feature (475)..(475): n is a, c, g, or t
  misc_feature (487)..(487): n is a, c, g, or t
  misc_feature (492)..(492): n is a, c, g, or t
  misc_feature (545)..(545): n is a, c, g, or t
  misc_feature (574)..(574): n is a, c, g, or t
ctctgtgtcctcctcggacctgatgtctaagtggttgggggagagtgagaagctagtcaagaacctgtttgagctggccaggcagcacaagccctccatcatcttcatcgatgaggtggattccctctgcgggtcccgcaatgaaaatgagagtgaggccgcccgaaggatcaaaacggagttcttggttcagatgcagggggtggggaataacaacnatgggactctggttcttggtgccacaaacatcccatgggtgttggattcagccattanaaggaggtttgaaaagaggatttacatcccactgcccgaggaggctgcccgtgcccagatgttccggttgcatctggggagcactccccacaatctcacggatgcnaacattcatgaagctggccccggaaagaacggaaggctnctcaagtgcccacatcagcatnnattgtgcggggacttccttcatgcagccctntaaaaaaaattnatttngcaaacacaactttaaaaaagggttgtgggccttcccgaccaaccctacgttntgaacgaagaacttcctgaccccttcctnaccaagggaacccggggccttggaaa

SEQ ID NO: 215253 - DNA, 600 bp, Canis familiaris
  misc_feature (448)..(448): n is a, c, g, or t
  misc_feature (516)..(516): n is a, c, g, or t
  misc_feature (554)..(554): n is a, c, g, or t
  misc_feature (562)..(562): n is a, c, g, or t
  misc_feature (564)..(565): n is a, c, g, or t
agccctaactcagcctactttatagcataagggaccatagtgtctgtgtagaccaagggggcagctggccttacaccttattaaagaagagaagcagggtattgtcagcatcttctcactcccttctccttgataacagctaccatgacaaccctgtggtttccaaggagcttagaatggagagaaattagctcatatgaaaaaaagactggcctaaggaacagcagttgttagttgctaatggtgtaaactgacccagccctctggtagacacaggatagataactctttggatagcatgtcttttttctgttaattagttgtatactctggcctctgtcatatcttcacaatggtgctcttttcatggggtattagccattcagttacagaaagatgatttgaagatcttgatttggtttcaaaatgatgcatatttcacattttncaagtttgggtatcacttggttgggggtgaccaaaagggctaaaaaaatgatcttttgatatgatctntacaaaggaaattgaccgttaaaattgcaaaaacattnaaaatggnannttctacattactaaatttttccaatatttggtttt

SEQ ID NO: 215254 - DNA, 600 bp, Canis familiaris
  misc_feature (345)..(345): n is a, c, g, or t
  misc_feature (370)..(370): n is a, c, g, or t
  misc_feature (379)..(379): n is a, c, g, or t
  misc_feature (398)..(398): n is a, c, g, or t
  misc_feature (401)..(401): n is a, c, g, or t
  misc_feature (414)..(414): n is a, c, g, or t
  misc_feature (465)..(465): n is a, c, g, or t
  misc_feature (482)..(482): n is a, c, g, or t
  misc_feature (485)..(485): n is a, c, g, or t
  misc_feature (490)..(490): n is a, c, g, or t
  misc_feature (521)..(521): n is a, c, g, or t
  misc_feature (583)..(583): n is a, c, g, or t
  misc_feature (585)..(585): n is a, c, g, or t
attgaggcggagaaaattgaaaaaagaagaaaaactgaattggaaatttttattcggctcaacagagcattccaagaggaggattctccagctactttttattgtatcagtatgcagtggtttagagaatgggaaagctttgtaaagggtaaagatggagatcctccaggtcctattgataacactaaaattgcagtcactaaatgtggcagtgtgatactcaggcaaggagcagattctggtcagatttctgaagaaacatggaattttctacagtctatatatggtggagggcctgaagttatctttcgacctccagttgttcatgttgaccctgatatactncagtcagaagaaaaaattggagganaaacctcgncctttgtaatttggggggnganagagtctaatganaaaaattttatttcctctcatatacacatgcaaaaacattcctaaaagcangttatttcttgattttnaanatttnatccttcttactgggcattatggaaaaaagngttaaaatgtgtcatatactacaggtgggatattaatgctagataactacctaaagcttcangnaatattttgaaagaa

SEQ ID NO: 215255 - DNA, 600 bp, Canis familiaris
  misc_feature (412)..(412): n is a, c, g, or t
  misc_feature (418)..(418): n is a, c, g, or t
  misc_feature (474)..(474): n is a, c, g, or t
  misc_feature (483)..(483): n is a, c, g, or t
  misc_feature (494)..(494): n is a, c, g, or t
  misc_feature (521)..(521): n is a, c, g, or t
  misc_feature (540)..(540): n is a, c, g, or t
  misc_feature (569)..(569): n is a, c, g, or t
  misc_feature (572)..(572): n is a, c, g, or t
  misc_feature (598)..(599): n is a, c, g, or t
acggtggcgattcacgacgaggagatctactgccggtcctgctacgggaagaagtacgggcccaagggctacggctacgggcagggcgcgggcacgctgagcaccgaccgcggagagaggctgggcatcaagcccgagagtgcaccacctcacaggcccacgacgaaccccaacacttctaagtttgctcagaaattcggaggcgctgagaagtgctcccgctgcggggacgccgtgtatgcagccgagaagatcatcggagccgggaagccctggcacaaaaactgtttccggtgtgccaagtgtgggaagagtctcgaatcaacaactttgactgagaaagaaggtgaaatctattgtaaaggatgctatgcaaagaactttgggcccaagggatttggctacggccaangagcangagcccttgttcaccccagtgaaggtgtaaacccagaaccgagatcacacaccggngaatcgttnatcacctagcncagatgacccacccttaacttctgtgnaatctgccccccttgagtnccgctgttgtccctacccgacaggctggntgnttgcagaggagaaaactttttccttnnt

SEQ ID NO: 215256 - DNA, 379 bp, Canis familiaris; identical to SEQ ID NO: 5149

SEQ ID NO: 215257 - DNA, 445 bp, Canis familiaris; identical to SEQ ID NO: 5150

SEQ ID NO: 215258 - DNA, 380 bp, Canis familiaris; identical to SEQ ID NO: 5151
  misc_feature (272)..(272): n is a, c, g, or t
  misc_feature (348)..(348): n is a, c, g, or t
  misc_feature (359)..(359): n is a, c, g, or t

SEQ ID NO: 215259 - DNA, 377 bp, Canis familiaris; identical to SEQ ID NO: 5152
  misc_feature (344)..(344): n is a, c, g, or t
  misc_feature (349)..(349): n is a, c, g, or t
  misc_feature (373)..(373): n is a, c, g, or t

SEQ ID NO: 215260 - DNA, 600 bp, Canis familiaris
  misc_feature (236)..(236): n is a, c, g, or t
  misc_feature (251)..(251): n is a, c, g, or t
  misc_feature (462)..(462): n is a, c, g, or t
  misc_feature (470)..(470): n is a, c, g, or t
  misc_feature (490)..(490): n is a, c, g, or t
  misc_feature (554)..(554): n is a, c, g, or t
  misc_feature (563)..(563): n is a, c, g, or t
  misc_feature (583)..(583): n is a, c, g, or t
  misc_feature (597)..(597): n is a, c, g, or t
agcacattagagagaaagaaaaaaagaaaaacaaaagcaaaacaaaacccgggcaccagccagacagcaccttttttttttttttttttttcccacccttcctgaaaacaaacaaccaaacaaccatcaaaacagtcatcaccaccatcatcaaaactgttaacatagcggcggcggcggcggcggcggcaaacgtcaccctccggccacggcgtccgcctaaagggatggttttntcggcggagcagctntttgccgaccaccttcttcactcgtgctgagcaggatttttgggctctccggggttcgggctgggagcagcttcatgactacgcggagcgggagagcggccacaccatgcgagagatctgagagaggaagccttcccccagctcttcagctccatcagtggaatcaaccccacctgcagaaggatgacagagatacagccagcttcccatnatttgggnggaataaacagaaaccttgnaagcgggtctttaaaattgcaagtcagcatggggccctaactattttgtgcaatggcgaaaaantaagtaggnatttaactctaaaaacttgnttactttggctttnaaa

SEQ ID NO: 215261 - DNA, 370 bp, Canis familiaris; identical to SEQ ID NO: 5154

SEQ ID NO: 215262 - DNA, 558 bp, Canis familiaris; identical to SEQ ID NO: 5155
  misc_feature (499)..(499): n is a, c, g, or t

SEQ ID NO: 215263 - DNA, 581 bp, Canis familiaris; identical to SEQ ID NO: 5156
  misc_feature (411)..(411): n is a, c, g, or t
  misc_feature (435)..(435): n is a, c, g, or t
  misc_feature (445)..(445): n is a, c, g, or t
  misc_feature (497)..(497): n is a, c, g, or t
  misc_feature (519)..(519): n is a, c, g, or t
  misc_feature (521)..(521): n is a, c, g, or t
  misc_feature (554)..(554): n is a, c, g, or t
  misc_feature (566)..(566): n is a, c, g, or t
  misc_feature (568)..(568): n is a, c, g, or t

SEQ ID NO: 215264 - DNA, 600 bp, Canis familiaris
  misc_feature (322)..(322): n is a, c, g, or t
  misc_feature (356)..(356): n is a, c, g, or t
  misc_feature (390)..(390): n is a, c, g, or t
  misc_feature (412)..(412): n is a, c, g, or t
  misc_feature (439)..(439): n is a, c, g, or t
  misc_feature (535)..(535): n is a, c, g, or t
  misc_feature (550)..(550): n is a, c, g, or t
  misc_feature (557)..(557): n is a, c, g, or t
tcttccgccatgaccgtctccgcttccgggacttcgtggatgccttggaggacagcctggaagaggtggctgtgagacagactggtgatgacgatgaggtggatgattttgagggcttcatcttcagccacttctttggagacaaatcactgaagaagaggtcaggaaagaaggacagacagttgcagagcccagggaggggctgaggcctggtgtcccctcaccccgggaaccactgaatggtcctctcctctggctcctatgagagcagaatctcttcagtgatgcactgatgcccgcttttgctagagaaaggccttancttggatcttgccttgcttggttactgcatgcangctctgatccttgtcctttgcgggtgggaattgngattcttcagcctacaagcttncatccttcttgtgtgtgtgccccacantgccccctggtttcatgcactgacccatgcccctgggaatgagctaaaacttcttgctggatgcccagaaccaacgcttttccaagggttttttanatttggacacacccncccccangggggaaggcccctttacccttgttttcaaggccccctctttt

SEQ ID NO: 215265 - DNA, 357 bp, Canis familiaris; identical to SEQ ID NO: 5158
  misc_feature (350)..(350): n is a, c, g, or t

SEQ ID NO: 215266 - DNA, 377 bp, Canis familiaris; identical to SEQ ID NO: 5159

SEQ ID NO: 215267 - DNA, 226 bp, Canis familiaris; identical to SEQ ID NO: 5160

SEQ ID NO: 215268 - DNA, 600 bp, Canis familiaris
  misc_feature (104)..(104): n is a, c, g, or t
  misc_feature (337)..(337): n is a, c, g, or t
  misc_feature (349)..(349): n is a, c, g, or t
  misc_feature (374)..(374): n is a, c, g, or t
  misc_feature (381)..(381): n is a, c, g, or t
  misc_feature (390)..(390): n is a, c, g, or t
  misc_feature (403)..(403): n is a, c, g, or t
  misc_feature (418)..(418): n is a, c, g, or t
  misc_feature (423)..(423): n is a, c, g, or t
  misc_feature (432)..(432): n is a, c, g, or t
  misc_feature (449)..(449): n is a, c, g, or t
  misc_feature (452)..(452): n is a, c, g, or t
  misc_feature (492)..(492): n is a, c, g, or t
  misc_feature (508)..(508): n is a, c, g, or t
  misc_feature (524)..(524): n is a, c, g, or t
  misc_feature (540)..(540): n is a, c, g, or t
  misc_feature (565)..(565): n is a, c, g, or t
  misc_feature (578)..(578): n is a, c, g, or t
  misc_feature (583)..(583): n is a, c, g, or t
catcgaggaccggcacggcggctacaagcccagcgacgagcacaagaccgacctcaaccccgacaacctgcagggcggcgacgacctggaccccaactatgtgnttgagctcgcgggtgcgcacgggtcgcagcatccgcggcttctgcctccccccgcactgcagccgcggggagcgccgtgccatcgagaagctcgccgtggaagctctgtcgagcctggacggcgacctggccggccggtactacgcgctcaagagcatgaccgaggcggagcagcagcagctcatcgacgaccacttctcttcgataaagcccgtgtcgcccctgctcctggnctcgggcatggnccgcgactgggcggacgcccgcggnattttgnacaatgacnataaaaccttctngggggggtcaacganggaanacccctggngggcaatttcattgcanaangggggcacattgaaggaaggggttaactcggttttgaaanggcttaccaaaattgnaaacactttttaagtnaaaaaataccaattcntgggaaaccctaactggggtaaatnttacttgccatcnaactngggaaagcttggggagg

SEQ ID NO: 215269 - DNA, 457 bp, Canis familiaris; identical to SEQ ID NO: 5162
  misc_feature (381)..(382): n is a, c, g, or t
  misc_feature (443)..(443): n is a, c, g, or t

SEQ ID NO: 215270 - DNA, 600 bp, Canis familiaris
  misc_feature (175)..(175): n is a, c, g, or t
  misc_feature (381)..(381): n is a, c, g, or t
  misc_feature (385)..(385): n is a, c, g, or t
  misc_feature (392)..(392): n is a, c, g, or t
  misc_feature (411)..(411): n is a, c, g, or t
  misc_feature (416)..(416): n is a, c, g, or t
  misc_feature (427)..(427): n is a, c, g, or t
  misc_feature (468)..(468): n is a, c, g, or t
  misc_feature (473)..(473): n is a, c, g, or t
  misc_feature (491)..(491): n is a, c, g, or t
  misc_feature (542)..(542): n is a, c, g, or t
  misc_feature (548)..(548): n is a, c, g, or t
  misc_feature (552)..(552): n is a, c, g, or t
caagaaaattaatgtatattttaatgatacattattattccctttaaatcttaatagtagttaactgtccttactgcttaacatacatttggtttaacattgatcagcataacatgttctaatttagctgatcaagttgtactatatttaaatcatcaacagttatcttgaatgnggtctaatgaggtcagttcacaatacaaaaagttacataaactttacatcttaattttctgtcaatttaaatgcaatgtgtaagaagcttatcttgttattgtgaaaaaactaaatgtaaatgaaaccaccttcttccatgcaggtgcgtaatcttgaaaaggaaaaatgctttcatgttggagccagaatttctgtagtaaaacntttnaacggtnttttaaagaaaaatggttntaaanaaaatttattnttggaaaggatcctaagcttgggctaggaccatacctgggnaaggnggggagaccatgaagggnctgaaaagggaaaaagaagagccttaatttaaagggcccctaataactttnaagctnttanatggggactcctttccaaaacattccttaaggggggaaaaacttactt

SEQ ID NO: 215271 - DNA, 394 bp, Canis familiaris; identical to SEQ ID NO: 5164
  misc_feature (390)..(390): n is a, c, g, or t

SEQ ID NO: 215272 - DNA, 470 bp, Canis familiaris; identical to SEQ ID NO: 5165
  misc_feature (331)..(331): n is a, c, g, or t
  misc_feature (360)..(360): n is a, c, g, or t
  misc_feature (380)..(380): n is a, c, g, or t
  misc_feature (386)..(386): n is a, c, g, or t
  misc_feature (441)..(441): n is a, c, g, or t
  misc_feature (444)..(444): n is a, c, g, or t

SEQ ID NO: 215273 - DNA, 377 bp, Canis familiaris; identical to SEQ ID NO: 5166
  misc_feature (336)..(336): n is a, c, g, or t
  misc_feature (356)..(356): n is a, c, g, or t

SEQ ID NO: 215274 - DNA, 339 bp, Canis familiaris; identical to SEQ ID NO: 5167

SEQ ID NO: 215275 - DNA, 600 bp, Canis familiaris
  misc_feature (336)..(336): n is a, c, g, or t
  misc_feature (415)..(415): n is a, c, g, or t
  misc_feature (420)..(420): n is a, c, g, or t
  misc_feature (476)..(476): n is a, c, g, or t
  misc_feature (484)..(484): n is a, c, g, or t
  misc_feature (509)..(509): n is a, c, g, or t
  misc_feature (516)..(516): n is a, c, g, or t
  misc_feature (528)..(528): n is a, c, g, or t
  misc_feature (570)..(570): n is a, c, g, or t
  misc_feature (586)..(586): n is a, c, g, or t
  misc_feature (597)..(597): n is a, c, g, or t
gatgggaaaaaaacatcacattgggagaaccgcctgggtttttgcactcgtggtggtgtgtattttgggacctttactgtgcagctcctgaaaggcgagacacttgtgaacattcgagtgaagcaaaagcctttcatgattacagtgcagcagccgccccgagccctgtgcttggcaacattccccccaacgatgggatgccgggaggccccatccctccgggtttctttcagcctccgggaggagttcctgggacccagccattgctgcccaattctatggatcccacccgacaacaagggcaccccaacatgggaggatcgatgcaaaaaatgnacccttcttcaaggcatgggcccatgggcctggcccaaaaattatggcagcggatgagaccaccacccaattccttggncccgncatgcccgggattaacatggcccgggagctggcaggccctggcaaatcctaacagngctaactnaattcatactcctctcatacctggnactacgngggacctctggnggggggggccccaggaacacccatatgctatccgagattaanaaattcagggcacatntaccaatgatnatc

SEQ ID NO: 215276 - DNA, 586 bp, Canis familiaris; identical to SEQ ID NO: 5169
  misc_feature (410)..(410): n is a, c, g, or t
  misc_feature (412)..(412): n is a, c, g, or t
  misc_feature (457)..(457): n is a, c, g, or t
  misc_feature (461)..(461): n is a, c, g, or t
  misc_feature (490)..(490): n is a, c, g, or t
  misc_feature (505)..(505): n is a, c, g, or t
  misc_feature (511)..(511): n is a, c, g, or t
  misc_feature (527)..(527): n is a, c, g, or t
  misc_feature (576)..(576): n is a, c, g, or t

SEQ ID NO: 215277 - DNA, 600 bp, Canis familiaris
  misc_feature (378)..(378): n is a, c, g, or t
  misc_feature (392)..(392): n is a, c, g, or t
  misc_feature (448)..(448): n is a, c, g, or t
  misc_feature (481)..(481): n is a, c, g, or t
  misc_feature (493)..(493): n is a, c, g, or t
  misc_feature (558)..(558): n is a, c, g, or t
  misc_feature (588)..(588): n is a, c, g, or t
  misc_feature (596)..(596): n is a, c, g, or t
tccccctccccaaggcccaatcctgacgttgctgtttgcttcccaacttgacctgagaggtgtctggaaaccatgcatgaatatttggtattctccaaccttttctccctaattcagacagctgtccgcccccagcacgcacacttatctatcctataggttgcgcctcagagctgctagtatgtgaacagcagtgcagtgccagtctgtgtcagctgtgaccgcaggacttgggagtctgaccgtttggtttctagcaaacagggggtgagcacccaattccccatcacattctcctttctcaccccgagatttacatgctgttgcctgaagggccttaataaggaggggcaggcctgggcatcgcaactaggtggntatgtcctcaagtntatcccttacaatagcttggagccagaaaactgggttgagaactgtgataaacttnttaaatgtgaaacttgtaagaaaaatacaaggngaagtgttaagnttttccagaaaggaaactacactatcgcaatgacattgtcattatttaggaagtggtattggaanctgcataaggtaaaaaaaaatggtaaatgntaactaanctta

SEQ ID NO: 215278 - DNA, 600 bp, Canis familiaris
  misc_feature (301)..(301): n is a, c, g, or t
  misc_feature (368)..(368): n is a, c, g, or t
  misc_feature (373)..(373): n is a, c, g, or t
  misc_feature (409)..(409): n is a, c, g, or t
  misc_feature (451)..(451): n is a, c, g, or t
  misc_feature (455)..(455): n is a, c, g, or t
  misc_feature (503)..(503): n is a, c, g, or t
  misc_feature (506)..(506): n is a, c, g, or t
  misc_feature (533)..(533): n is a, c, g, or t
  misc_feature (545)..(545): n is a, c, g, or t
  misc_feature (555)..(555): n is a, c, g, or t
  misc_feature (579)..(579): n is a, c, g, or t
atcatattaatttgaaggtggcggggcaggatggttctgtggtgcagtttaagattaagaggcatacaccacttagtaaactaatgaaagcctattgtgaacgacagggtttgtcaatgaggcagatcagattccgatttgatgggcagccaatcaatgaaacagacacacctgcacagttggaaatggaggatgaagatacaattgatgtgttccagcagcagacaggaggtgtctactaaaaagggaacctgctactttactccagaactctgttcctccagaccaagaagacattctnaaatagaaagcccgtaatttgggttcaccacattctgactactacagaaaagtttctctattctttnatttncccttcccattcctttattgtacataaagaactgtntatgtgcacaagcatattgcattttttttttaactaaatggncaanggattgtttgatcgacatcaaatggagatgggatgggggaaaaactgnttntgtgaaaaacccctctttcattattgnatgctagtcagntttatttttnttcagaagtatttgtttcctgttncaaaaaaaagacccctttaat

SEQ ID NO: 215279 - DNA, 600 bp, Canis familiaris; identical to SEQ ID NO: 5172
  misc_feature (374)..(374): n is a, c, g, or t
  misc_feature (408)..(408): n is a, c, g, or t
  misc_feature (527)..(527): n is a, c, g, or t
  misc_feature (538)..(538): n is a, c, g, or t
  misc_feature (542)..(542): n is a, c, g, or t
  misc_feature (560)..(560): n is a, c, g, or t
  misc_feature (566)..(566): n is a, c, g, or t
  misc_feature (568)..(568): n is a, c, g, or t
  misc_feature (586)..(586): n is a, c, g, or t

SEQ ID NO: 215280 - DNA, 479 bp, Canis familiaris; identical to SEQ ID NO: 5173
  misc_feature (390)..(390): n is a, c, g, or t
  misc_feature (396)..(396): n is a, c, g, or t
  misc_feature (433)..(433): n is a, c, g, or t
  misc_feature (451)..(451): n is a, c, g, or t
  misc_feature (463)..(463): n is a, c, g, or t

SEQ ID NO: 215281 - DNA, 620 bp, Canis familiaris; identical to SEQ ID NO: 5174
  misc_feature (363)..(363): n is a, c, g, or t
  misc_feature (378)..(378): n is a, c, g, or t
  misc_feature (402)..(402): n is a, c, g, or t
  misc_feature (412)..(412): n is a, c, g, or t
  misc_feature (439)..(439): n is a, c, g, or t
  misc_feature (458)..(458): n is a, c, g, or t
  misc_feature (491)..(491): n is a, c, g, or t
  misc_feature (499)..(499): n is a, c, g, or t
  misc_feature (533)..(533): n is a, c, g, or t
  misc_feature (536)..(536): n is a, c, g, or t
  misc_feature (578)..(578): n is a, c, g, or t
  misc_feature (593)..(593): n is a, c, g, or t
  misc_feature (601)..(601): n is a, c, g, or t

SEQ ID NO: 215282 - DNA, 240 bp, Canis familiaris; identical to SEQ ID NO: 5175
  misc_feature (7)..(7): n is a, c, g, or t
  misc_feature (24)..(24): n is a, c, g, or t
  misc_feature (117)..(117): n is a, c, g, or t
  misc_feature (119)..(119): n is a, c, g, or t
  misc_feature (128)..(128): n is a, c, g, or t
  misc_feature (146)..(146): n is a, c, g, or t
  misc_feature (150)..(150): n is a, c, g, or t
  misc_feature (157)..(157): n is a, c, g, or t
  misc_feature (173)..(173): n is a, c, g, or t
  misc_feature (183)..(183): n is a, c, g, or t
  misc_feature (185)..(185): n is a, c, g, or t
  misc_feature (220)..(220): n is a, c, g, or t
  misc_feature (222)..(222): n is a, c, g, or t

SEQ ID NO: 215283 - DNA, 595 bp, Canis familiaris; identical to SEQ ID NO: 5176
  misc_feature (371)..(371): n is a, c, g, or t
  misc_feature (383)..(383): n is a, c, g, or t
  misc_feature (388)..(388): n is a, c, g, or t
  misc_feature (397)..(397): n is a, c, g, or t
  misc_feature (425)..(425): n is a, c, g, or t
  misc_feature (458)..(458): n is a, c, g, or t
  misc_feature (461)..(461): n is a, c, g, or t
  misc_feature (484)..(484): n is a, c, g, or t
  misc_feature (523)..(523): n is a, c, g, or t
  misc_feature (531)..(531): n is a, c, g, or t
  misc_feature (547)..(547): n is a, c, g, or t
  misc_feature (584)..(584): n is a, c, g, or t

SEQ ID NO: 215284 - DNA, 600 bp, Canis familiaris
  misc_feature (318)..(318): n is a, c, g, or t
  misc_feature (359)..(359): n is a, c, g, or t
  misc_feature (382)..(382): n is a, c, g, or t
  misc_feature (411)..(411): n is a, c, g, or t
  misc_feature (414)..(414): n is a, c, g, or t
  misc_feature (463)..(463): n is a, c, g, or t
  misc_feature (501)..(501): n is a, c, g, or t
  misc_feature (530)..(530): n is a, c, g, or t
  misc_feature (538)..(538): n is a, c, g, or t
  misc_feature (554)..(554): n is a, c, g, or t
  misc_feature (597)..(597): n is a, c, g, or t
tggctcagcgacttctcctgaggaggttcctggcctccgtcatctccaggaagccccctcagggtcgatgggcacctctcacctgcagggccctgccgtgcagccctggtcacctgacagcaacacccacccaagcccggtcaatatacaccaccagagtctgcacaacgaccttcaacatccaggatggacctgactttcaagaccgagttgtcaacagcgaaacaccagtggttgtggacttccatgcacagtggtgtggcccgtgcaagatcctggggcccaggttagagaaagtggtgggcaaacagcatgggnaaagtggtgatggccaaggtggatattgatgaccaaaaaanaccttgcccttggaatataaggngtccgttgggcccactggtgctggccatnaanaatggggacgtgggtggacaaattctggggtattaaggacgaggaccanctggaggccttctgaaaaactgattggctgacaagcanggaaaaggctggttgccttgccacaaggnccctgaanttgaggaggggcccgngagaactttaacccttcgggtgggccttctgctcttcctttgnccg

SEQ ID NO: 215285 - DNA, 600 bp, Canis familiaris
  misc_feature (336)..(336): n is a, c, g, or t
  misc_feature (350)..(350): n is a, c, g, or t
  misc_feature (482)..(482): n is a, c, g, or t
  misc_feature (542)..(542): n is a, c, g, or t
  misc_feature (547)..(547): n is a, c, g, or t
  misc_feature (551)..(551): n is a, c, g, or t
  misc_feature (570)..(570): n is a, c, g, or t
gagtgtggaggtgccccccagaccccaggcccttgcagacggtccccgagaacacagcaagagtgccagcctcctgtttggcatgcggaacagtgcagccagtgatgaggactccagctgggctaccttatcccagggcagcccctcctacggctccccagaggacacagattccttctggaaccccaacgccttcgagacggattccgacctgccagctggatggatgagggtccaggatacctcagggacctactactggcacatcccaacagggaccacccagtgggagcccccaagccgggccttttccttaaaagggaagaagcccccaanaggagtttaagttnacttggacaggctttgcccataaaaaagctttgaggatggagaattttggaaggatgaacccagtgaggaggttctatggatttgggatgaaggacactgaggagggggcattgcctttccagttaaagctnagccagagcattccccaaaagaggagaagttgccccacggaatgcaacccagggataagnggttngccngccttcttagctggtgganataccaggaggaattgccctgacccaaatg

SEQ ID NO: 215286 - DNA, 248 bp, Canis familiaris; identical to SEQ ID NO: 5179

SEQ ID NO: 215287 - DNA, 494 bp, Canis familiaris; identical to SEQ ID NO: 5180
  misc_feature (309)..(309): n is a, c, g, or t
  misc_feature (312)..(312): n is a, c, g, or t
  misc_feature (347)..(347): n is a, c, g, or t
  misc_feature (385)..(385): n is a, c, g, or t
  misc_feature (399)..(399): n is a, c, g, or t
  misc_feature (418)..(418): n is a, c, g, or t
  misc_feature (445)..(445): n is a, c, g, or t
  misc_feature (449)..(449): n is a, c, g, or t
  misc_feature (478)..(478): n is a, c, g, or t
  misc_feature (488)..(488): n is a, c, g, or t

SEQ ID NO: 215288 - DNA, 489 bp, Canis familiaris; identical to SEQ ID NO: 5181
  misc_feature (337)..(337): n is a, c, g, or t
  misc_feature (378)..(378): n is a, c, g, or t
  misc_feature (420)..(420): n is a, c, g, or t
  misc_feature (433)..(433): n is a, c, g, or t
  misc_feature (456)..(456): n is a, c, g, or t

SEQ ID NO: 215289 - DNA, 600 bp, Canis familiaris
  misc_feature (307)..(307): n is a, c, g, or t
  misc_feature (351)..(351): n is a, c, g, or t
  misc_feature (389)..(389): n is a, c, g, or t
  misc_feature (472)..(472): n is a, c, g, or t
  misc_feature (488)..(488): n is a, c, g, or t
  misc_feature (523)..(523): n is a, c, g, or t
  misc_feature (554)..(554): n is a, c, g, or t
  misc_feature (556)..(556): n is a, c, g, or t
  misc_feature (572)..(572): n is a, c, g, or t
  misc_feature (584)..(584): n is a, c, g, or t
ggtcctatttcagatgctaaagaaaatccttatggagaggatgacaataagagcccattccccctgcagcccaaaaacaaacgcagttatgcccagaatgtgactgtctggatcaaacccagtggcctgcagacagatgtacagaagattttaagaaatgcaaggaaactacctgaaaaaacacagacattctataaggagctaaaccgtttacgaaaggctgccctggcatttggtttcctggatctgctaaaaggggtggctgacatgttggaaagggagtgcacgcttgttgcccaaacaaggnaacccagacgccgaattccagttgacccatgccggcagaagttnaagctggccagtactggcacctccgagtatgccggctntgagcacaacatcacaccgttgcacacaaacttttttgggagcacgttgaaaggatgtgaccttactatgggaacctgccttntttttttatgacaggngaaaatgacttgggggtaaaaacttttcaattcgntcaccttttaagaaccactaaaaacccttgngnttgcttaaaagactgnttttgggtttanggctggtcaacctgag

SEQ ID NO: 215290 - DNA, 341 bp, Canis familiaris; identical to SEQ ID NO: 5183

SEQ ID NO: 215291 - DNA, 600 bp, Canis familiaris
  misc_feature (308)..(308): n is a, c, g, or t
  misc_feature (318)..(318): n is a, c, g, or t
  misc_feature (353)..(353): n is a, c, g, or t
  misc_feature (424)..(424): n is a, c, g, or t
  misc_feature (464)..(464): n is a, c, g, or t
  misc_feature (480)..(480): n is a, c, g, or t
  misc_feature (495)..(495): n is a, c, g, or t
  misc_feature (540)..(540): n is a, c, g, or t
  misc_feature (578)..(578): n is a, c, g, or t
  misc_feature (599)..(599): n is a, c, g, or t
tcggctgctgggggcattccacaaccaaaaacaggtgaccagagcttttgctggtggtgttcagacagtcactttaattccaggagatggtatcggccctgagatctcagctgcagttatgaagatttttgatgctgccaaagcgcccattcagtgggaggagcggaatgtcactgccattcaaggaccggggggaaagtggatgatccctcctgaagccaaagagtccatggataagaacaagatgggcctgaaaggccctctgaagaccccaatagcagcaggccacccatctatgaatttactgntgcgtaaganaattgacccttattcaaatgtccgaccggtgtttnaatcgagggttacaaaaccccttacaccgacgtgaacattgtaccatccgggagaacacaaaaggagagtncagggcataaaacatatcgggatggggtcgtcaaagcatnaactcatcactgagangcgacagcgcattgntgattttgccttcgagtatgcccccaacaccaccggagtaacgtncagttgggcacaaagccaatatattgcgaatgtaaatnggctttttttacaaaaaggang

SEQ ID NO: 215292 - DNA, 600 bp, Canis familiaris
  misc_feature (302)..(302): n is a, c, g, or t
  misc_feature (310)..(310): n is a, c, g, or t
  misc_feature (341)..(341): n is a, c, g, or t
  misc_feature (416)..(416): n is a, c, g, or t
  misc_feature (429)..(429): n is a, c, g, or t
  misc_feature (444)..(444): n is a, c, g, or t
  misc_feature (478)..(478): n is a, c, g, or t
  misc_feature (490)..(490): n is a, c, g, or t
  misc_feature (503)..(503): n is a, c, g, or t
  misc_feature (514)..(514): n is a, c, g, or t
  misc_feature (530)..(530): n is a, c, g, or t
  misc_feature (548)..(548): n is a, c, g, or t
  misc_feature (565)..(565): n is a, c, g, or t
  misc_feature (582)..(583): n is a, c, g, or t
aagcagatgcagctagcctttgcggcagtgaacgtgtggagaaagaatctgcagcagtaccatcccactgatatcacgggcacgctcaacctctcagatccctcggtcagcaccgtggtgtgaggcccccggaggcgcccacctgcccagttagcccggccaaggacactgatgggtcctgctgctcgggaaggcctgagggaagcccgcccacccaagactgcccaccctgggcctcccgtctgtctgtccgccctgctgcctggcgggcagcccctgctggaccgaggcttggaccaaancaactgangacaaggcaaaaacttaacttggttgggcangggccacaagggacttccggcaaaaggaagggccctggggtctttaaacaatgggggaaggggggttgacctggncccaaggccggangggcttggaacaaanttaaaacccattttttcccaaacacaaatttggnccaatggggggngcaagggccccanttggggggggnaagccctttttcaaangccggttttgggaagctngggttcaatccctttcntttttttaccttcaaannccttttcggttggacta

SEQ ID NO: 215293 - DNA, 358 bp, Canis familiaris; identical to SEQ ID NO: 5186
  misc_feature (350)..(350): n is a, c, g, or t

SEQ ID NO: 215294 - DNA, 341 bp, Canis familiaris; identical to SEQ ID NO: 5187
  misc_feature (216)..(216): n is a, c, g, or t

SEQ ID NO: 215295 - DNA, 577 bp, Canis familiaris; identical to SEQ ID NO: 5188
  misc_feature (359)..(359): n is a, c, g, or t
  misc_feature (370)..(370): n is a, c, g, or t
  misc_feature (378)..(378): n is a, c, g, or t
  misc_feature (405)..(405): n is a, c, g, or t
  misc_feature (440)..(440): n is a, c, g, or t
  misc_feature (447)..(447): n is a, c, g, or t
  misc_feature (500)..(500): n is a, c, g, or t
  misc_feature (519)..(519): n is a, c, g, or t

SEQ ID NO: 215296 - DNA, 412 bp, Canis familiaris; identical to SEQ ID NO: 5189
  misc_feature (372)..(372): n is a, c, g, or t

SEQ ID NO: 215297 - DNA, 600 bp, Canis familiaris
  misc_feature (346)..(346): n is a, c, g, or t
  misc_feature (359)..(359): n is a, c, g, or t
  misc_feature (367)..(367): n is a, c, g, or t
  misc_feature (372)..(372): n is a, c, g, or t
  misc_feature (393)..(393): n is a, c, g, or t
  misc_feature (410)..(410): n is a, c, g, or t
  misc_feature (425)..(425): n is a, c, g, or t
  misc_feature (580)..(580): n is a, c, g, or t
  misc_feature (594)..(594): n is a, c, g, or t
gcaccaggcggcagccctgggccagcgcaccatctgccactacatcgtggaggctggggcctctctcatgaagacagaccagcagggcgacactccccggcagcgggccgagaaggctcaggacacggagctggccgcctacctggagaaccggcagcactaccagatgatccagcgggaggaccaagagacggccgtgtagctgtgaggccagcgccgggcagcaggagggacagggccagccggaggaggagccccctcatcgcccactgcactgccacattccagtcggactgccacggggggacccaggccccaaggaaggagccccgtgcttgcccctgangaagccgcccggnccaagggntgggntttgaggagctgggggacctnacctgcccccctgaggncccagcctgacccanggctgacaggggaacaggaaactggactggcccggcaggcctttggggcctggggctggacaagccttcccctctgggaggggtgccctcctggggttaggggggggggcccaaaaggttggggcctatgggacttcggaaaggttctaacattngtccttaggcctgntttagg

SEQ ID NO: 215298 - DNA, 648 bp, Canis familiaris; identical to SEQ ID NO: 5191
  misc_feature (436)..(436): n is a, c, g, or t
  misc_feature (453)..(453): n is a, c, g, or t
  misc_feature (524)..(524): n is a, c, g, or t
  misc_feature (543)..(543): n is a, c, g, or t
  misc_feature (546)..(546): n is a, c, g, or t
  misc_feature (590)..(590): n is a, c, g, or t
  misc_feature (635)..(635): n is a, c, g, or t
  misc_feature (637)..(637): n is a, c, g, or t

SEQ ID NO: 215299 - DNA, 399 bp, Canis familiaris; identical to SEQ ID NO: 5192
  misc_feature (318)..(318): n is a, c, g, or t
  misc_feature (347)..(347): n is a, c, g, or t
  misc_feature (393)..(393): n is a, c, g, or t

SEQ ID NO: 215300 - DNA, 467 bp, Canis familiaris; identical to SEQ ID NO: 5193
  misc_feature (331)..(331): n is a, c, g, or t
  misc_feature (365)..(365): n is a, c, g, or t
  misc_feature (408)..(408): n is a, c, g, or t
  misc_feature (423)..(423): n is a, c, g, or t
  misc_feature (433)..(433): n is a, c, g, or t
  misc_feature (446)..(446): n is a, c, g, or t
  misc_feature (453)..(453): n is a, c, g, or t

SEQ ID NO: 215301 - DNA, 441 bp, Canis familiaris; identical to SEQ ID NO: 5194
  misc_feature (380)..(380): n is a, c, g, or t
  misc_feature (382)..(382): n is a, c, g, or t

SEQ ID NO: 215302 - DNA, 510 bp, Canis familiaris; identical to SEQ ID NO: 5195
  misc_feature (345)..(345): n is a, c, g, or t
  misc_feature (384)..(384): n is a, c, g, or t
  misc_feature (392)..(392): n is a, c, g, or t
  misc_feature (402)..(402): n is a, c, g, or t
  misc_feature (410)..(410): n is a, c, g, or t
  misc_feature (424)..(424): n is a, c, g, or t
  misc_feature (440)..(440): n is a, c, g, or t
  misc_feature (483)..(483): n is a, c, g, or t

SEQ ID NO: 215303 - DNA, 362 bp, Canis familiaris; identical to SEQ ID NO: 5196
  misc_feature (319)..(319): n is a, c, g, or t
  misc_feature (357)..(357): n is a, c, g, or t

SEQ ID NO: 215304 - DNA, 600 bp, Canis familiaris
  misc_feature (324)..(324): n is a, c, g, or t
  misc_feature (351)..(351): n is a, c, g, or t
  misc_feature (358)..(358): n is a, c, g, or t
  misc_feature (372)..(372): n is a, c, g, or t
  misc_feature (399)..(399): n is a, c, g, or t
  misc_feature (407)..(407): n is a, c, g, or t
  misc_feature (419)..(419): n is a, c, g, or t
  misc_feature (470)..(470): n is a, c, g, or t
  misc_feature (481)..(481): n is a, c, g, or t
  misc_feature (493)..(493): n is a, c, g, or t
  misc_feature (511)..(511): n is a, c, g, or t
  misc_feature (519)..(519): n is a, c, g, or t
  misc_feature (533)..(533): n is a, c, g, or t
  misc_feature (545)..(545): n is a, c, g, or t
  misc_feature (588)..(588): n is a, c, g, or t
  misc_feature (596)..(596): n is a, c, g, or t
caggttgggacaggcactgagtggtctcctctaggatggaggtccgtgggagttcatgccagcagtttccattttaaataagtgcttctagctctactgttacattcctctcacttctatgctgacatgttaccgttctggattccaggtctgaggaataaatagtattgatagtatgatgtatggttcaagggcacatgccctagtttctcctttggttgctggcagattctgaggctacagagaaatgcactgagtgtgagtgttctcatctgtgatccctcccttagatggtgatggtgatcgatctgttgtaaatatatncatatatgcatttatgcactttcaagnggagtgnattaaaaataaggnccttaatacctcccatctgttgaaaanggtggaanggataaagcacnttttccaaaatggaggaaacaatttattttggattttaatttttggccaanggggaactganggggggtgcttntttgatggtataaggggnaaaatagngcttttatgggaanttggagcccaanaccaaatggcatttgaataatcagctccaaaggggtagccaanttttaggngggg

SEQ ID NO: 215305 - DNA, 472 bp, Canis familiaris; identical to SEQ ID NO: 5198
  misc_feature (364)..(364): n is a, c, g, or t
  misc_feature (378)..(378): n is a, c, g, or t
  misc_feature (443)..(443): n is a, c, g, or t
  misc_feature (449)..(449): n is a, c, g, or t
  misc_feature (464)..(464): n is a, c, g, or t

SEQ ID NO: 215306 - DNA, 587 bp, Canis familiaris; identical to SEQ ID NO: 5199
  misc_feature (410)..(410): n is a, c, g, or t
  misc_feature (465)..(465): n is a, c, g, or t
  misc_feature (522)..(522): n is a, c, g, or t
  misc_feature (529)..(529): n is a, c, g, or t
  misc_feature (554)..(554): n is a, c, g, or t

SEQ ID NO: 215307 - DNA, 382 bp, Canis familiaris; identical to SEQ ID NO: 5200

SEQ ID NO: 215308 - DNA, 600 bp, Canis familiaris
  misc_feature (385)..(386): n is a, c, g, or t
  misc_feature (427)..(427): n is a, c, g, or t
  misc_feature (480)..(480): n is a, c, g, or t
  misc_feature (527)..(527): n is a, c, g, or t
  misc_feature (555)..(555): n is a, c, g, or t
  misc_feature (597)..(597): n is a, c, g, or t
aaactgaccggcgtgtttgcccctcgcccatctactggcccccataagctgagagaatgtcttcctctcatcattttcctaaggaacagacttaagtatgccctaacaggggatgaagtgaagaagatctgtatgcagcgttttattaagattgatggcaaggtccgaactgatatcacctaccctgctggttttatggatgtcatcagcattgacaagactggggagaatttccgtctaatctatgacaccaagggtcgctttgctgttcatcggattacacctgaggaggccaagtataagttgtgcaaagtgagaaaagatctttttgggaacaaaaaggaatccttcaccctgggggactcatgatgctcgcaccatccgnntatcctgatcccctcatcaaaggggaatgataccattcaanattgatttggagactggaaagaattaccggatttcatcaagtttgatctgggnaatctgtgtatggggactggaggtgccaacctgggaagaattggtgnggtcaccaccgagagaaacacctgggtnttttgatgtagttcacgtgaaaaagccaatggcaacactttncct

SEQ ID NO: 215309 - DNA, 565 bp, Canis familiaris; identical to SEQ ID NO: 5202
  misc_feature (450)..(450): n is a, c, g, or t
  misc_feature (498)..(498): n is a, c, g, or t
  misc_feature (521)..(521): n is a, c, g, or t
  misc_feature (539)..(539): n is a, c, g, or t
  misc_feature (545)..(545): n is a, c, g, or t

SEQ ID NO: 215310 - DNA, 595 bp, Canis familiaris; identical to SEQ ID NO: 5203
  misc_feature (381)..(381): n is a, c, g, or t
  misc_feature (392)..(392): n is a, c, g, or t
  misc_feature (404)..(404): n is a, c, g, or t
  misc_feature (487)..(487): n is a, c, g, or t
  misc_feature (565)..(566): n is a, c, g, or t

SEQ ID NO: 215311 - DNA, 600 bp, Canis familiaris
  misc_feature (348)..(348): n is a, c, g, or t
  misc_feature (361)..(361): n is a, c, g, or t
  misc_feature (367)..(367): n is a, c, g, or t
  misc_feature (393)..(393): n is a, c, g, or t
  misc_feature (413)..(413): n is a, c, g, or t
  misc_feature (421)..(421): n is a, c, g, or t
  misc_feature (431)..(431): n is a, c, g, or t
  misc_feature (445)..(445): n is a, c, g, or t
  misc_feature (454)..(454): n is a, c, g, or t
  misc_feature (464)..(464): n is a, c, g, or t
  misc_feature (489)..(489): n is a, c, g, or t
  misc_feature (495)..(495): n is a, c, g, or t
  misc_feature (516)..(516): n is a, c, g, or t
  misc_feature (520)..(520): n is a, c, g, or t
  misc_feature (552)..(552): n is a, c, g, or t
  misc_feature (568)..(568): n is a, c, g, or t
  misc_feature (589)..(590): n is a, c, g, or t
  misc_feature (594)..(594): n is a, c, g, or t
cccggacgcaccatgcgcgaatgcatctcagtccacgtggggcaggcaggtgtccagatgggcaatgcctgctgggagctctactgtctggaacatgggatccagcctgatgggcagatgcccagtgacaagaccatcggtggaggggacgactcctttaccaccttcttctgtgaaaccggcgctggaaagcatgtgccccgggcagtgtttgtggatctggagcccactgtgattgatgagatccgaaatggcccctaccggcagctcttccacccagagcagctcatcactgggaaggaggatgctgctacaactacgccccgtggtcactataccattgggaangaaaacatttgancccgtnttggacccggaatccccaaggttttnttaaccaatggaccgggaanttaagggntttcttgggnttccacaacttttngaagggggnacccgggttngggttttaaccttaattttttgatnggaacngggtttttggtgactaacggnaaanaaatcaaacttggagtttttcattttaccccncccccaaggggtcaangcgggggggggccttaaattnntttnacaacc

SEQ ID NO: 215312 - DNA, 372 bp, Canis familiaris; identical to SEQ ID NO: 5205
  misc_feature (366)..(366): n is a, c, g, or t

SEQ ID NO: 215313 - DNA, 440 bp, Canis familiaris; identical to SEQ ID NO: 5206
  misc_feature (353)..(353): n is a, c, g, or t
  misc_feature (375)..(375): n is a, c, g, or t
  misc_feature (383)..(384): n is a, c, g, or t
  misc_feature (405)..(405): n is a, c, g, or t
  misc_feature (410)..(410): n is a, c, g, or t
  misc_feature (419)..(419): n is a, c, g, or t

SEQ ID NO: 215314 - DNA, 557 bp, Canis familiaris; identical to SEQ ID NO: 5207
  misc_feature (391)..(391): n is a, c, g, or t
  misc_feature (401)..(401): n is a, c, g, or t
  misc_feature (407)..(407): n is a, c, g, or t
  misc_feature (437)..(437): n is a, c, g, or t
  misc_feature (457)..(457): n is a, c, g, or t
  misc_feature (487)..(487): n is a, c, g, or t
  misc_feature (489)..(489): n is a, c, g, or t
  misc_feature (504)..(504): n is a, c, g, or t
  misc_feature (520)..(520): n is a, c, g, or t

SEQ ID NO: 215315 - DNA, 640 bp, Canis familiaris; identical to SEQ ID NO: 5208
  misc_feature (367)..(367): n is a, c, g, or t
  misc_feature (542)..(542): n is a, c, g, or t
  misc_feature (578)..(578): n is a, c, g, or t
  misc_feature (595)..(595): n is a, c, g, or t
  misc_feature (608)..(608): n is a, c, g, or t
  misc_feature (613)..(613): n is a, c, g, or t
  misc_feature (627)..(627): n is a, c, g, or t
  misc_feature (638)..(638): n is a, c, g, or t

SEQ ID NO: 215316 - DNA, 453 bp, Canis familiaris; identical to SEQ ID NO: 5209
  misc_feature (374)..(374): n is a, c, g, or t
  misc_feature (422)..(422): n is a, c, g, or t
  misc_feature (432)..(432): n is a, c, g, or t
  misc_feature (443)..(443): n is a, c, g, or t

SEQ ID NO: 215317 - DNA, 523 bp, Canis familiaris; identical to SEQ ID NO: 5210
  misc_feature (330)..(330): n is a, c, g, or t
  misc_feature (348)..(348): n is a, c, g, or t
  misc_feature (359)..(359): n is a, c, g, or t
  misc_feature (391)..(391): n is a, c, g, or t
  misc_feature (401)..(401): n is a, c, g, or t
  misc_feature (411)..(411): n is a, c, g, or t
  misc_feature (436)..(436): n is a, c, g, or t
  misc_feature (446)..(446): n is a, c, g, or t
  misc_feature (488)..(488): n is a, c, g, or t
  misc_feature (505)..(505): n is a, c, g, or t
  misc_feature (518)..(518): n is a, c, g, or t

SEQ ID NO: 215318 - DNA, 600 bp, Canis familiaris
  misc_feature (313)..(313): n is a, c, g, or t
  misc_feature (423)..(423): n is a, c, g, or t
  misc_feature (511)..(511): n is a, c, g, or t
  misc_feature (547)..(548): n is a, c, g, or t
  misc_feature (564)..(564): n is a, c, g, or t
agcaataggcagagataattcttaaggcttttaggattggggacctaaataatttattcctctaagctgagttctagttgcgacagaagaaactgagaccctcagaggtgcagtgatatgcccacctgggaccagaagccatggctcctattttactcactagtgtatttttccacctctggttatatggagctctcaggcacacaccataaatcttggctttagaaggcaccagcccagaaccacaacccttcctggattccttttattttctctccagttctgcctttggacaggccatctagcacctctnccctgagaaatcaactggaggggaaaaagaggtggattaaggggaggagcaatgtggttggtggcttggcctgtatggagttccaggtttccattctggatctgcttgangggggtaaagatagcaagtttggcataagcatggatgggggaagatccccttcccatactgttggccaaggataggttggcaagaatnggtttgggttgctgtgggctgggttatttttttaannatggccctgtgagganaacttactgttcctaagatttccaacagggctgact

SEQ ID NO: 215319 - DNA, 600 bp, Canis familiaris
  misc_feature (341)..(341): n is a, c, g, or t
  misc_feature (366)..(366): n is a, c, g, or t
  misc_feature (413)..(413): n is a, c, g, or t
  misc_feature (489)..(489): n is a, c, g, or t
  misc_feature (492)..(492): n is a, c, g, or t
  misc_feature (534)..(534): n is a, c, g, or t
  misc_feature (555)..(555): n is a, c, g, or t
  misc_feature (561)..(561): n is a, c, g, or t
  misc_feature (566)..(566): n is a, c, g, or t
aactctcaaccaaagaaaagaagtacagaagggcaccaggagccccttgggtctccaggctctggataagctaagaaggaagacttcacctgtactacatcctcccagaggtaaatacaaatacggtactttgaggccttgggaaactgccagaaagttactttattttttatttttgcaaatcagctaagtgacttcagattgtgactacatttcgattccattagctcatcaagggtttcttaatgaggctaattagccccaaacagctcccaccgcctcagactccactgagagctgggttgtctataaacccgagagcctgtgacctcatcagtggntgaaaaaactaagttcttggcattnaagcttcatcaaaagcttaatgcttaaatacttttcacagttaatgnggggttttcgggtttgcggggccctggatccctgggagccactgagtggccgaaccccacttttgcagccaggaangangctgccctgtggaggcccatgtacaaatgagatcaaatctgnggacactatttgttgccaggnaaactnttgcnggagaagtactcaaaaaattaaagtggttatgag

SEQ ID NO: 215320 - DNA, 600 bp, Canis familiaris
  misc_feature (234)..(234): n is a, c, g, or t
  misc_feature (240)..(240): n is a, c, g, or t
  misc_feature (392)..(392): n is a, c, g, or t
  misc_feature (403)..(403): n is a, c, g, or t
  misc_feature (414)..(414): n is a, c, g, or t
  misc_feature (428)..(428): n is a, c, g, or t
  misc_feature (459)..(459): n is a, c, g, or t
  misc_feature (505)..(505): n is a, c, g, or t
  misc_feature (523)..(523): n is a, c, g, or t
  misc_feature (565)..(566): n is a, c, g, or t
  misc_feature (575)..(575): n is a, c, g, or t
  misc_feature (590)..(590): n is a, c, g, or t
gctgcccgcgtcgccaggtgccgcgccgggggacagcgtgaacagctacgggagccagtactacaacgggcccagcagtgacagcggtgtcccagagcccgccgcgtgcgtagtcaccaccgctgccatcgacgtccaccagcccaacatctcctccgacctcttctcaggcgacacgcccctgcagctcagcagcaatggcacctgcgccagcgccaccttcgacggcgcctnccgctncacgcacagcttcgtcccccaggcccagagccacagcagccggacgctgggctcctgcacggactgcagcacggcccgggaggaggaggaggaaggaggagccctcctttgagcccgggccccgggccccggcgcccccggttggaacgganaaggcaacggngcaagaactgntgttcttccccgtngaagggcccttgccccccccaaagggccttngaccaagccccgtttttccgggccgggccaacggggttaaacccancaagccccaactggaagngaagctaagttttttaacaaaaaaaaccggaggggtttgcgnnttttaaaanaaaaccggggttcantttaaaccgt

SEQ ID NO: 215321 - DNA, 520 bp, Canis familiaris; identical to SEQ ID NO: 5214
  misc_feature (363)..(363): n is a, c, g, or t
  misc_feature (464)..(464): n is a, c, g, or t
  misc_feature (492)..(492): n is a, c, g, or t
  misc_feature (498)..(498): n is a, c, g, or t
  misc_feature (506)..(506): n is a, c, g, or t

SEQ ID NO: 215322 - DNA, 600 bp, Canis familiaris
  misc_feature (323)..(323): n is a, c, g, or t
  misc_feature (371)..(371): n is a, c, g, or t
  misc_feature (387)..(387): n is a, c, g, or t
  misc_feature (441)..(441): n is a, c, g, or t
  misc_feature (516)..(516): n is a, c, g, or t
  misc_feature (531)..(531): n is a, c, g, or t
  misc_feature (544)..(544): n is a, c, g, or t
  misc_feature (567)..(567): n is a, c, g, or t
  misc_feature (586)..(586): n is a, c, g, or t
tgtgataagattcaaagaaaccctattccctgcacagaaatgtttcttatcacattgtatcttagtatggaaaggaatatggtcccttttctgcaattgctactgtacacacacgcacgcacgcgcgcacacacacacacatgcacatattcattcgtccaagtggtattttcaacgtctgtgtgggtgtcactgttcatgcagtatctatttcccagcgaactttgaatggagggcaacttttctaaccagattgtcttttcagaccgaagacctgggaactggggaaagagtttggaaagaagggaaggcaatggaaagantgagctttaaatttgaaagatattttcccaacaaggaacttgggctcnatgactgcagaaactntaaccctccgatcttttgcagggggggcatggaacactgcttgtatcaatctgngtaccctattaaacccatgtttacacacacacatccttccttccatcagtatatacgtggtttgggatgagcagncaatagttttgaganggagtttggtccnttttttttttcctcattatactnttaaaatggtggcagtttnaaacaacaaaaaat

SEQ ID NO: 215323 - DNA, 600 bp, Canis familiaris
  misc_feature (453)..(453): n is a, c, g, or t
  misc_feature (484)..(484): n is a, c, g, or t
  misc_feature (555)..(555): n is a, c, g, or t
  misc_feature (571)..(571): n is a, c, g, or t
  misc_feature (580)..(580): n is a, c, g, or t
  misc_feature (594)..(594): n is a, c, g, or t
atagtattattgagcaatgaatttttttatttccgcatggaaagttattgatctctatggctgtaaaatatttctttatagcattattaaagtgtgtcttaatacaattaaatttgggatacaaagtatttattttacaatgggtggggggaagctttttccagaaagtttccaatatgacgttttcataagttcaaaaaaaaaaaagtttccttcgtgcttactttctaagttaaaacttcatctgcgactttaaaatggaaaggattcttttaattgtggacgataggcataatactgtttgcatctgaatgttctgtaagtgaatgaaattttaatcgatggactcatgacttctggttacccgaatgctttcaaccggagtatggaagtggacaccattcaagcatggcatcaggtcattccgttcaagttcttgtgccagctcacccnctcgttgaaattccagttctgggataagggngggagccctaaaggcttctgcagtttaaatgggttaaacctgggatacttaacaatttattgtcaattgcnctggtttaattggtgntaaaaaaanaccccctgctttantacaat

SEQ ID NO: 215324 - DNA, 630 bp, Canis familiaris; identical to SEQ ID NO: 5217
  misc_feature (394)..(394): n is a, c, g, or t
  misc_feature (414)..(414): n is a, c, g, or t
  misc_feature (477)..(477): n is a, c, g, or t
  misc_feature (508)..(508): n is a, c, g, or t
  misc_feature (513)..(513): n is a, c, g, or t
  misc_feature (535)..(535): n is a, c, g, or t
  misc_feature (547)..(547): n is a, c, g, or t
  misc_feature (596)..(596): n is a, c, g, or t

SEQ ID NO: 215325 - DNA, 600 bp, Canis familiaris
  misc_feature (355)..(355): n is a, c, g, or t
  misc_feature (367)..(367): n is a, c, g, or t
  misc_feature (377)..(377): n is a, c, g, or t
  misc_feature (381)..(381): n is a, c, g, or t
  misc_feature (400)..(400): n is a, c, g, or t
  misc_feature (441)..(441): n is a, c, g, or t
  misc_feature (485)..(485): n is a, c, g, or t
  misc_feature (487)..(487): n is a, c, g, or t
  misc_feature (547)..(547): n is a, c, g, or t
  misc_feature (549)..(549): n is a, c, g, or t
  misc_feature (580)..(581): n is a, c, g, or t
cgcggcggtcacctgggctcctgaggctctggggagtactcggcggttgccttcgcgccggacaggctggcggtgttggggccgtgtggcgccgagaaggggaaccgctcgcgggcacgttcggactcgtgaagctacgtcgcgctgagcactctgggatttgtagttctcgagatggagcgcgctgtgccacacgcggtacctctgggtcagatggaagtgtttcaggctctgcagcggctccacatgaccattttttcccagagtgtctccccctgcgggaagttcctggcagctggcaacaattacgggcagataagccatcttcaacttgtctggtggtcttagttctganggccaaagaaanaagtaagaanccantggtgacattccaagcccntgatggaccggtctacaacatggtttcacaagatcgacatntgtttaatgctggggatggggaaagtgaaagcctgctttggcananatcctcaaaaaaggaaagagtgtggaaattgggggatggcttggggtgccttgttcccananagcctttgaccttattgtagcatttccttcnncaaaggttgtaaggagctg

SEQ ID NO: 215326 - DNA, 395 bp, Canis familiaris; identical to SEQ ID NO: 5219
  misc_feature (327)..(327): n is a, c, g, or t
  misc_feature (332)..(332): n is a, c, g, or t
  misc_feature (385)..(385): n is a, c, g, or t

SEQ ID NO: 215327 - DNA, 600 bp, Canis familiaris
  misc_feature (347)..(347): n is a, c, g, or t
  misc_feature (400)..(400): n is a, c, g, or t
  misc_feature (403)..(403): n is a, c, g, or t
  misc_feature (457)..(457): n is a, c, g, or t
  misc_feature (533)..(533): n is a, c, g, or t
  misc_feature (550)..(550): n is a, c, g, or t
  misc_feature (552)..(552): n is a, c, g, or t
  misc_feature (568)..(568): n is a, c, g, or t
  misc_feature (581)..(581): n is a, c, g, or t
cggggctcggccggagctcgggaggcactaaacaggagcctgcaggggtctccacagagggcatcaggatgtcgtattttggagagcatttttggggtgagaagaaccatggcttcgaggtcctgtaccacagcgtgaagcaggggcccatctccaccaaggagctggctgacttcatccgggagagggccaccatcgaggagacctactcaaaggctatggcgaaactttccaagctggccagcaatgggacccccgtggggaccttcgccccactctgggaggtcttccgcgtctcctcagacaagctggcgctctgccacctggagctgacgcggaaacttcangacctcatcaaaggacgtgcttccgctattgcgaggagcagctcaagatacanaanaagtgccaaagaaggaaaccagtgggcacccttggacgctgtgcaaggtccttncaaggtgttaagccaagttcttgccaaagtcccgagagaacttaccttgaacccgttgcatggaaccaagaaccgnttgcggagggagagccncncccccaaggagatggncaaggcagaaacnaaacaaaaaagggggaaaa

SEQ ID NO: 215328 - DNA, 274 bp, Canis familiaris; identical to SEQ ID NO: 5221

SEQ ID NO: 215329 - DNA, 600 bp, Canis familiaris
  misc_feature (290)..(290): n is a, c, g, or t
  misc_feature (314)..(314): n is a, c, g, or t
  misc_feature (316)..(316): n is a, c, g, or t
  misc_feature (324)..(324): n is a, c, g, or t
  misc_feature (339)..(339): n is a, c, g, or t
  misc_feature (369)..(369): n is a, c, g, or t
  misc_feature (380)..(380): n is a, c, g, or t
  misc_feature (424)..(424): n is a, c, g, or t
  misc_feature (438)..(438): n is a, c, g, or t
  misc_feature (443)..(443): n is a, c, g, or t
  misc_feature (463)..(463): n is a, c, g, or t
  misc_feature (479)..(479): n is a, c, g, or t
  misc_feature (500)..(500): n is a, c, g, or t
  misc_feature (524)..(524): n is a, c, g, or t
  misc_feature (543)..(543): n is a, c, g, or t
  misc_feature (546)..(546): n is a, c, g, or t
  misc_feature (553)..(553): n is a, c, g, or t
  misc_feature (590)..(590): n is a, c, g, or t
  misc_feature (599)..(599): n is a, c, g, or t
acagggggtcaccgaggccgcggagaagaccaaggagggcgtcctctatgtcggaagcaagactcgagagggggtggtacaaggagtggcctcagtggctgaaaaaaccaaggagcaggcgtcccatctgggaggagctgtgttctctggggctgggaacattgcggcagccacaggcttggtgaagaaggaggaattccctgctgatctgaagccagaggaagtggcccaggaagctgctgaggagccgctgatcgagcccctgatggagccagaaggggaaagttatnaggaaccaccccaggaggagtatnanggagtatnaaccaaaagcgtaanggttcaccaacggccccccaccaaaagaanaatccccttcntttcccttgccaggcccccaaagcaagggttgtccttttacccnttccccttaaaacncaaanattgtggggggttggccatntggttgtctaaccctnccggttcaaaccttgggcgtnggacagggccggggttacggcctnggttgtgggcttccccccnctntttttgncccttccacccttccgtcaaagtttgggcggatgtantttttactnt

SEQ ID NO: 215330 - DNA, 383 bp, Canis familiaris; identical to SEQ ID NO: 5223

SEQ ID NO: 215331 - DNA, 599 bp, Canis familiaris; identical to SEQ ID NO: 5224
  misc_feature (420)..(420): n is a, c, g, or t
  misc_feature (423)..(423): n is a, c, g, or t
  misc_feature (481)..(481): n is a, c, g, or t
  misc_feature (524)..(524): n is a, c, g, or t
  misc_feature (555)..(555): n is a, c, g, or t
  misc_feature (558)..(558): n is a, c, g, or t
  misc_feature (573)..(573): n is a, c, g, or t

SEQ ID NO: 215332 - DNA, 600 bp, Canis familiaris
  misc_feature (250)..(250): n is a, c, g, or t
  misc_feature (312)..(312): n is a, c, g, or t
  misc_feature (332)..(332): n is a, c, g, or t
  misc_feature (363)..(363): n is a, c, g, or t
  misc_feature (379)..(379): n is a, c, g, or t
  misc_feature (387)..(387): n is a, c, g, or t
  misc_feature (423)..(423): n is a, c, g, or t
  misc_feature (477)..(477): n is a, c, g, or t
  misc_feature (484)..(484): n is a, c, g, or t
  misc_feature (486)..(486): n is a, c, g, or t
  misc_feature (506)..(506): n is a, c, g, or t
  misc_feature (529)..(529): n is a, c, g, or t
  misc_feature (535)..(535): n is a, c, g, or t
  misc_feature (541)..(541): n is a, c, g, or t
  misc_feature (561)..(561): n is a, c, g, or t
  misc_feature (572)..(572): n is a, c, g, or t
  misc_feature (585)..(585): n is a, c, g, or t
caggtcgtgccacgacctctccgtgctctgagccgcggtcgccatggtcacggcggtcgccatggtcgccgcgccctccactcgcccccccgccccgccccgcgtcctccgcgaagaccgtctaggaattcaaaaacgcccgggacgcccgggtgtgtgggccgcggctcggccccgcgggtgcccgggctggctgcccgccgcggaggcctgcagggcgaggacgcaggccggcgggcgggcggcttcnggagggcaggaggggctacaggcccgcgagctgttttgacttttattaaagtcgcgcttgancaccttttccattaaaagantcttaaaagcgagaactggaaaagtactttntagacccttttacggncccccagntttgtactcttgcgcgaaataccccttacctttaanaaacccttaaaggtaaagacacggaaaacgcgttttttgagacaccttaaaacntgcttgntntgaacaagcggcactttgtncacttttgcttttaagagctttnttaaangcaaangcctggaagcgctatttttnagaattgattntttgattcaccgncacagcacgggattt

SEQ ID NO: 215333 - DNA, 600 bp, Canis familiaris
  misc_feature (394)..(394): n is a, c, g, or t
  misc_feature (451)..(451): n is a, c, g, or t
  misc_feature (462)..(462): n is a, c, g, or t
  misc_feature (515)..(515): n is a, c, g, or t
  misc_feature (522)..(522): n is a, c, g, or t
  misc_feature (528)..(528): n is a, c, g, or t
  misc_feature (562)..(562): n is a, c, g, or t
  misc_feature (584)..(584): n is a, c, g, or t
  misc_feature (594)..(594): n is a, c, g, or t
cggccacactctacttccgggacctgggggcccagatcagctgggtgacggtcttcctgactgagtacgcagggcccctctttatctatctgctcttctacttccgcgtccccttcatctacggccacaaatacgacttcacgtccagccggcactcggtggtgcacctcgcctgcatctgccactcattccactacatcaagcgtctgctggagacgctcttcgtgcaccgcttctcccatggcaccatgcccttgcgcaacatcttcaagaactgcacctactactggggctttgccgctggatgggctattaacatcaaccaatcttttttacacgccccctacctaacggagcttaacaaggttaaactgggcactgggcaatctttgtngatctggcaagctttgggaacttttcattcacatgggccttgcgagaacctggcggncagcgggggtncaaagaccaagaaaaatcccataccccaccaagaaacccctttacgggggttntttctgntggggncctgcccaactacacctaacaaggggggggcctnggattgggttttgcaatattanacaaagtttncaaggg

SEQ ID NO: 215334 - DNA, 550 bp, Canis familiaris; identical to SEQ ID NO: 5227
  misc_feature (394)..(394): n is a, c, g, or t
  misc_feature (411)..(411): n is a, c, g, or t
  misc_feature (421)..(421): n is a, c, g, or t
  misc_feature (427)..(427): n is a, c, g, or t
  misc_feature (436)..(436): n is a, c, g, or t
  misc_feature (465)..(465): n is a, c, g, or t
  misc_feature (480)..(480): n is a, c, g, or t
  misc_feature (492)..(492): n is a, c, g, or t
  misc_feature (526)..(526): n is a, c, g, or t

SEQ ID NO: 215335 - DNA, 600 bp, Canis familiaris
  misc_feature (351)..(351): n is a, c, g, or t
  misc_feature (387)..(387): n is a, c, g, or t
  misc_feature (400)..(400): n is a, c, g, or t
  misc_feature (408)..(408): n is a, c, g, or t
  misc_feature (493)..(493): n is a, c, g, or t
  misc_feature (548)..(548): n is a, c, g, or t
  misc_feature (581)..(581): n is a, c, g, or t
  misc_feature (596)..(596): n is a, c, g, or t
aggcgagctgggcccgcagcttcttcacaaaataattgatggcatttgtggccgggcttaccctctctaccaggattatcacagtgtttgggattcaacagaatggaagaatgttctagaagatatcaccaaatttttcaaagctgtagttggtaaaaatttatctgatgaagagatatctcagcagttgaatcagttgaattcatttcatcaacaagctatcatgaaatgcttgaaaagtaggaaagatgagatcaagcaggctctgttaaaagaaatagttgatatttcttctgcacaactacaagattttgattggcagttaaagcttgcctgtcttagtgacaagancgctactttacaaaatgcccctcttaaacctttatnttagacataaaanaaaatggngaagtcaaaccgtattccgttgaaatgagtaaaagaagagctgcagaaacttaataagctccttggaagcagctaataagggggncctgccagttgaaatacctggaaatggcaaatacccacactgtctgggtccctgntcccccaaatgcagccgagttgaatcttgtggntccaaaccctggctntctg

SEQ ID NO: 215336 - DNA, 420 bp, Canis familiaris; identical to SEQ ID NO: 5229
  misc_feature (399)..(399): n is a, c, g, or t
  misc_feature (414)..(414): n is a, c, g, or t

SEQ ID NO: 215337 - DNA, 443 bp, Canis familiaris; identical to SEQ ID NO: 5230
  misc_feature (321)..(321): n is a, c, g, or t
  misc_feature (382)..(382): n is a, c, g, or t
  misc_feature (385)..(385): n is a, c, g, or t
  misc_feature (408)..(408): n is a, c, g, or t
  misc_feature (420)..(420): n is a, c, g, or t
  misc_feature (422)..(422): n is a, c, g, or t

SEQ ID NO: 215338 - DNA, 600 bp, Canis familiaris
  misc_feature (385)..(385): n is a, c, g, or t
  misc_feature (479)..(480): n is a, c, g, or t
  misc_feature (485)..(485): n is a, c, g, or t
  misc_feature (510)..(510): n is a, c, g, or t
  misc_feature (569)..(570): n is a, c, g, or t
  misc_feature (594)..(594): n is a, c, g, or t
  misc_feature (598)..(598): n is a, c, g, or t
agcagcctctccccatctacctagcaactgtcttcatcaccaccccaattacggtcacagtgctaccagactatagatggtagctaatttttctttacctattttctaatgtcatgattcctgtttgcccaatggatcatttgtatgttaaccactgtatgtaaccaacccttatctggcaacataattgcagcacaataatgatttgcatgataccttgaaatttggggggagggggcatgccaagttgggcatcactttgtcttagcaattaatgggatattgataactaaaataagttaatattaagcaaggtgccggttgtacaatctctaatttgatcaatgtcttttcagcactttgagcatttacttagctcatttangctttctttgtagcgcaatgggttgggaaggaaaaagtgcatgccatcttttccttcactcctcttttcccaccctttacctttgcacataaannatttnggtttgcttccatcttttatgcagngcctggtttatttaaccaagtaatatcccttttgttgatgagctattgagaagctgcannagttgcttttaagattggtgttcntttnag

SEQ ID NO: 215339 - DNA, 559 bp, Canis familiaris; identical to SEQ ID NO: 5232
  misc_feature (396)..(396): n is a, c, g, or t
  misc_feature (452)..(452): n is a, c, g, or t
  misc_feature (457)..(457): n is a, c, g, or t
  misc_feature (459)..(459): n is a, c, g, or t

SEQ ID NO: 215340 - DNA, 242 bp, Canis familiaris; identical to SEQ ID NO: 5233
  misc_feature (5)..(5): n is a, c, g, or t
  misc_feature (13)..(13): n is a, c, g, or t
  misc_feature (56)..(56): n is a, c, g, or t
  misc_feature (140)..(140): n is a, c, g, or t
  misc_feature (153)..(154): n is a, c, g, or t
  misc_feature (204)..(204): n is a, c, g, or t
  misc_feature (237)..(237): n is a, c, g, or t

SEQ ID NO: 215341 - DNA, 398 bp, Canis familiaris; identical to SEQ ID NO: 5234
  misc_feature (379)..(379): n is a, c, g, or t

SEQ ID NO: 215342 - DNA, 393 bp, Canis familiaris; identical to SEQ ID NO: 5235
  misc_feature (384)..(384): n is a, c, g, or t

SEQ ID NO: 215343 - DNA, 600 bp, Canis familiaris
  misc_feature (418)..(418): n is a, c, g, or t
  misc_feature (468)..(468): n is a, c, g, or t
  misc_feature (485)..(485): n is a, c, g, or t
  misc_feature (530)..(530): n is a, c, g, or t
  misc_feature (557)..(557): n is a, c, g, or t
  misc_feature (566)..(566): n is a, c, g, or t
cgccgcccgcgaagccggagctcgagccgcaggggggatgccgttctgagtgcctgactgcctcgccccgaaggatggcctctgatgggcattagaggcacagcagccccgggctcctgtcccgtccgtctgtctgttatcgtctgtccctcttgacatcaccgcagctccaccccctcccatcccagcccccaacgccagcttcctgtgggcccagagccggcatgaactctcccaccgagtcggatgggatgtcaggccgggaaccatccttggaaatcctgcctcggacccctctacacggcattcctgtggcaatggaagtgaaacccgttgcttgcttggaagcattgcccagcttcattaagggggtggggggaggaggcagccccaaccccgcggagctacggggggcttntggcaggccctgtggaccccgcacttgagggaagcagcagcttgcagcangagcttcttggcgcttnaacagcaacacaagctgaaaagcaagttcctgtttgccgattcanaaaagcatgacacctgacccggagacnagtcagttnagaacacctagcacacagaatgttgcggcaaaag

SEQ ID NO: 215344 - DNA, 379 bp, Canis familiaris; identical to SEQ ID NO: 5237

SEQ ID NO: 215345 - DNA, 600 bp, Canis familiaris
  misc_feature (368)..(368): n is a, c, g, or t
  misc_feature (386)..(386): n is a, c, g, or t
  misc_feature (401)..(401): n is a, c, g, or t
  misc_feature (410)..(410): n is a, c, g, or t
  misc_feature (426)..(426): n is a, c, g, or t
  misc_feature (484)..(484): n is a, c, g, or t
  misc_feature (504)..(504): n is a, c, g, or t
  misc_feature (527)..(527): n is a, c, g, or t
  misc_feature (556)..(556): n is a, c, g, or t
  misc_feature (586)..(586): n is a, c, g, or t
ccccagaagcaacggtcggccccgcactgctgccgctgtcccgaaatctgcgaaatacatcgctcaggtgctgcaggattcagaggtggacggggatggggatggggctcccgggagctcgggggatgagcccccgttgtcctcgtcccaagatgaggagctgctgatgcctcctgatggcctcacggacacagacttccagtcttatgaggacagcctcatagagaatgagattcaccagtaaggggagggaggggccctggaggccacgccctgccccccaccccacccaccccccacggacactaaaaaaaaaaaaaacgctaataatttattagatctaaaagccctttcttccccatccttgnttttaattaaaggaattnaaacctggggatttnaccactctnccccccatggaggggngggagggaccccccccaaccttaattgaggaaaagccccagccggacccggggcaaanaggggtggcggacaggattncccaaataatgcccccaccccantattgtggtcaggaaagggtttttgaaancaaaaagggtcctggggccatgggttgganacttggccgggcaa

SEQ ID NO: 215346 - DNA, 415 bp, Canis familiaris; identical to SEQ ID NO: 5239
  misc_feature (247)..(248): n is a, c, g, or t
  misc_feature (279)..(280): n is a, c, g, or t
  misc_feature (299)..(300): n is a, c, g, or t
  misc_feature (351)..(351): n is a, c, g, or t
  misc_feature (360)..(360): n is a, c, g, or t
  misc_feature (396)..(396): n is a, c, g, or t
  misc_feature (406)..(406): n is a, c, g, or t

SEQ ID NO: 215347 - DNA, 207 bp, Canis familiaris; identical to SEQ ID NO: 5240

SEQ ID NO: 215348 - DNA, 356 bp, Canis familiaris; identical to SEQ ID NO: 5241

SEQ ID NO: 215349 - DNA, 592 bp, Canis familiaris; identical to SEQ ID NO: 5242
  misc_feature (375)..(375): n is a, c, g, or t
  misc_feature (385)..(385): n is a, c, g, or t
  misc_feature (406)..(406): n is a, c, g, or t
  misc_feature (435)..(435): n is a, c, g, or t
  misc_feature (463)..(463): n is a, c, g, or t
  misc_feature (486)..(486): n is a, c, g, or t
  misc_feature (490)..(490): n is a, c, g, or t
  misc_feature (533)..(533): n is a, c, g, or t
  misc_feature (556)..(556): n is a, c, g, or t

SEQ ID NO: 215350 - DNA, 563 bp, Canis familiaris; identical to SEQ ID NO: 5243
  misc_feature (371)..(371): n is a, c, g, or t
  misc_feature (397)..(397): n is a, c, g, or t
  misc_feature (411)..(411): n is a, c, g, or t
  misc_feature (436)..(436): n is a, c, g, or t
  misc_feature (456)..(456): n is a, c, g, or t
  misc_feature (467)..(467): n is a, c, g, or t
  misc_feature (476)..(476): n is a, c, g, or t
  misc_feature (490)..(490): n is a, c, g, or t
  misc_feature (533)..(533): n is a, c, g, or t
  misc_feature (548)..(548): n is a, c, g, or t
  misc_feature (551)..(551): n is a, c, g, or t

SEQ ID NO: 215351 - DNA, 600 bp, Canis familiaris
  misc_feature (171)..(171): n is a, c, g, or t
  misc_feature (342)..(342): n is a, c, g, or t
  misc_feature (382)..(382): n is a, c, g, or t
  misc_feature (384)..(384): n is a, c, g, or t
  misc_feature (421)..(421): n is a, c, g, or t
  misc_feature (495)..(495): n is a, c, g, or t
  misc_feature (528)..(528): n is a, c, g, or t
  misc_feature (550)..(550): n is a, c, g, or t
gccggcgcgcacagccgggcccggcgtcctccgcagcagccgcgagccgcgcggccggtgccagacggttccggcggggggcaggggcggggcgccccggcggcggaggagccccggcgaggcccgtctggctgtgacgagttgccatggcatcctactacgacatcctanacgtgccgcgaagtgcgtccgctgacgacatcaagaaggcatatcgccggaaggcccttcagtggcacccggacaagaacccggataataaagaatttgctgagaggaagttcaaggaggtggccgaggcatatgaagtgctgtcagacaaacataaacgggaaaacttcnaaccgttttggccgggaagggcttgcttgggcaggaactngnccatcccggcagaaaccttgttggggtggggcccggnttaccttaccttccgaagccccgaggaggttttccgggagtttttttgggaagtggagacccttttccggagcntttttgataacctgggccctttttaaaagcttnaaagccggggttcccgaccctngggcccctttttaactttttttcttctttctgggggacttgattttcctc

SEQ ID NO: 215352 - DNA, 600 bp, Canis familiaris
  misc_feature (348)..(348): n is a, c, g, or t
  misc_feature (402)..(402): n is a, c, g, or t
  misc_feature (406)..(406): n is a, c, g, or t
  misc_feature (445)..(445): n is a, c, g, or t
  misc_feature (459)..(459): n is a, c, g, or t
  misc_feature (504)..(504): n is a, c, g, or t
  misc_feature (512)..(512): n is a, c, g, or t
  misc_feature (557)..(557): n is a, c, g, or t
  misc_feature (567)..(567): n is a, c, g, or t
  misc_feature (593)..(593): n is a, c, g, or t
gctcctgaggaatgaaaggaacccagggatcctcagaaggcagcagtgatgtggaccaaccccctggagcctgcacccttccaagggccataggcgacccagggaaccggagagagctccagaccggaaatcccagctttcctaaagtctctgtggatgctgacaaaaggagacccgaatttttggaagagcctgccctaggttacccagctgcagagtgattttcccctctggcattgaacctacccctccaacccccagccatccagagtaccatgaagaattatgaggatgtgtgacaagaagtattcaaatggtttgatcaacactggtggggagccttcgagnttttaagtttaatgaccattgcaatggggcaccggactactggttatattccanaggngtgtgcagggactaaatttacaagtgataatgaaaccanccggaagaatgaanaaataatgacccattcggggcttgtggaggacctgttcctaaaangggctttncgaggagtgtgcaagaaaatcgatcactttcctgaaaccttgctntgaacaaganacacagaatacttctggggctggganggcccct

SEQ ID NO: 215353 - DNA, 374 bp, Canis familiaris; identical to SEQ ID NO: 5246
  misc_feature (353)..(353): n is a, c, g, or t

SEQ ID NO: 215354 - DNA, 530 bp, Canis familiaris; identical to SEQ ID NO: 5247
  misc_feature (429)..(429): n is a, c, g, or t
  misc_feature (448)..(448): n is a, c, g, or t
  misc_feature (475)..(475): n is a, c, g, or t
  misc_feature (515)..(515): n is a, c, g, or t

SEQ ID NO: 215355 - DNA, 462 bp, Canis familiaris; identical to SEQ ID NO: 5248
  misc_feature (330)..(330): n is a, c, g, or t
  misc_feature (335)..(335): n is a, c, g, or t
  misc_feature (353)..(353): n is a, c, g, or t
  misc_feature (384)..(384): n is a, c, g, or t
  misc_feature (389)..(389): n is a, c, g, or t
  misc_feature (411)..(411): n is a, c, g, or t
  misc_feature (416)..(416): n is a, c, g, or t
  misc_feature (419)..(419): n is a, c, g, or t

SEQ ID NO: 215356 - DNA, 366 bp, Canis familiaris; identical to SEQ ID NO: 5249

SEQ ID NO: 215357 - DNA, 600 bp, Canis familiaris
  misc_feature (367)..(367): n is a, c, g, or t
  misc_feature (373)..(373): n is a, c, g, or t
  misc_feature (391)..(391): n is a, c, g, or t
  misc_feature (395)..(395): n is a, c, g, or t
  misc_feature (464)..(464): n is a, c, g, or t
  misc_feature (483)..(483): n is a, c, g, or t
  misc_feature (495)..(495): n is a, c, g, or t
  misc_feature (500)..(500): n is a, c, g, or t
  misc_feature (536)..(536): n is a, c, g, or t
  misc_feature (553)..(553): n is a, c, g, or t
  misc_feature (556)..(556): n is a, c, g, or t
  misc_feature (575)..(575): n is a, c, g, or t
  misc_feature (593)..(593): n is a, c, g, or t
gggtctaggagtgaaggagacaccccagcaaaagtaccagcgactactgcatgaggtccaagagctgacaactgaagttgagaaaatcaagacatcggtgaaggagtcagccactgaagagaagctgaccccagtggttttggctaagcagctggcagccttgaagcagcagctggttgcttcccacctggagaagctgctgggaccagatgcagctatcaaccttactgaccctgatggagctctggctaagcgcctgctgctgcagctggaagcaacaaaaaacagcaaaggaactggttcagggggaaagaccaccggtgggactcccgtagatagtaacctttgtcacttacgaactacattnttcggnctgaacaaggacaagttntctnaacttgccaaagttgcagaactttgagaagcgccttgacagactggaagcccttgtacgctttgatcangacctcaaaatcccctttnacaagtctacanggagncttgtcttatggagactgtaaactgttcagcaaagngacgccttgacctccanttntggacaaatggaggttcgntcagatgtctggcaaggngacaaat

SEQ ID NO: 215358 - DNA, 600 bp, Canis familiaris
  misc_feature (312)..(312): n is a, c, g, or t
  misc_feature (368)..(368): n is a, c, g, or t
  misc_feature (380)..(380): n is a, c, g, or t
  misc_feature (421)..(421): n is a, c, g, or t
  misc_feature (460)..(460): n is a, c, g, or t
  misc_feature (486)..(486): n is a, c, g, or t
  misc_feature (494)..(494): n is a, c, g, or t
ggcacctcctacttgggcaaagagcactggaagacttgcttcgtggtactcagcaacgggatcctctaccagtatcctgaccgcaccgatgtcacccctctgctctcggtgaacatggggggggagcagtgcggtggctgtcggagggccaacaccacggatcggccccacgccttccaggtcatcctcgccgaccggccgtgcctggagctgagcgccgagagcgaggctgacatggccgactggatgcagcacctgtgccaggctgtgtccaaaggggtcatcccccagggggtaacttccaagccctgnattccctggttgctaatgatcaccgatgaccgctttttacgtgccacgaggactgncagactagcttnttccgtcttgggcacaaccaactggccgacataacgccgtntcaccggccctggcaaggagtactgtgtcttgacttttncaagacaagcaagaagcctttcttgncctgggtnattacttgagctgacgtctgaactggacggttctgtctgccttggctttggtggaaaacatttacaagtggactgccacaagccatcaggaactcaacagaagttg

SEQ ID NO: 215359 - DNA, 600 bp, Canis familiaris
  misc_feature (225)..(225): n is a, c, g, or t
  misc_feature (346)..(346): n is a, c, g, or t
  misc_feature (422)..(422): n is a, c, g, or t
  misc_feature (444)..(444): n is a, c, g, or t
  misc_feature (492)..(492): n is a, c, g, or t
  misc_feature (514)..(514): n is a, c, g, or t
  misc_feature (520)..(520): n is a, c, g, or t
  misc_feature (532)..(532): n is a, c, g, or t
  misc_feature (547)..(547): n is a, c, g, or t
  misc_feature (562)..(562): n is a, c, g, or t
ctgggcggggttgaggtttgctttggttcttgtttcagcccgatatgtacagaatgttcaaaacagtctgcacctttgatgtgatattgcttttccaaagccaccaatccattttgtggattttatgtgtctgtggctttaataatcatggtaacaacaataatccctttttctccgttttgcttgcaaggaaacatgcctatctttcttagttttttgttttgnttttttctttgagaagaagagtaaaatagtcacattttaatactactctagttaggacagacttgtgcttttatcttgagtaaaaaggtaactattggaaatcacctacccagtaaaaganctaaagtttaattttcccatggataggggaggaaccctggtcttgctgagttgagttgggacaaggatgtcactgnctttttttttttcccttccctntgttataaaagttaaagcacaccctcactccaagagcttaaaaataantaaatggctttgagtagagtanaaatanctgtcttgtttntggatgcaaccgcanaagggaacaaaagangacttaatttaaacttttgccgagttttgtttttttaa

SEQ ID NO: 215360 - DNA, 504 bp, Canis familiaris; identical to SEQ ID NO: 5253
  misc_feature (465)..(465): n is a, c, g, or t
  misc_feature (472)..(472): n is a, c, g, or t
  misc_feature (475)..(475): n is a, c, g, or t

SEQ ID NO: 215361 - DNA, 674 bp, Canis familiaris; identical to SEQ ID NO: 5254
  misc_feature (419)..(419): n is a, c, g, or t
  misc_feature (424)..(424): n is a, c, g, or t
  misc_feature (469)..(469): n is a, c, g, or t
  misc_feature (471)..(471): n is a, c, g, or t
  misc_feature (595)..(595): n is a, c, g, or t
  misc_feature (614)..(614): n is a, c, g, or t
  misc_feature (623)..(623): n is a, c, g, or t
  misc_feature (666)..(666): n is a, c, g, or t

SEQ ID NO: 215362 - DNA, 600 bp, Canis familiaris
  misc_feature (478)..(478): n is a, c, g, or t
  misc_feature (571)..(571): n is a, c, g, or t
  misc_feature (589)..(589): n is a, c, g, or t
cggcttctccatggcctgggcatcagttcctggctgagccattttcttttttgactaaaagcccccgcccagaggccgattcgtcgcggcggcggtggggatcgcaggtcgctcaggcttgcagatgggtcaggggctgtggagagtggccagaaaccagcagctacagcaagaaggttatagtgagcaaggctacctcagcagagaccagagcaggaggatggctgccaacaacatttctaataccagtcatcgtaaacaagtccaaggaggcattgatatatatcatcttttgaaggcacggaaatctaaagaacaggaaggattcattaatttggaaatgtttgccccctgagctaagctttaccatcttgtcctacctgaatgcaactgacctctgcttacttcatgtgtttggcaagacttgcaaatgatgaacttctttggcaagggtgtgtaaatccacttgggtcactgntcatatataataagaacccacctctaggatttttttcaaaaatttatatgcactggatgaagcagcctacctttatgccaccagaggaggagngactcttatgtcaaggtntctaatgctac

SEQ ID NO: 215363 - DNA, 531 bp, Canis familiaris; identical to SEQ ID NO: 5256
  misc_feature (52)..(52): n is a, c, g, or t
  misc_feature (366)..(366): n is a, c, g, or t
  misc_feature (390)..(390): n is a, c, g, or t
  misc_feature (393)..(393): n is a, c, g, or t
  misc_feature (456)..(456): n is a, c, g, or t

SEQ ID NO: 215364 - DNA, 374 bp, Canis familiaris; identical to SEQ ID NO: 5257

SEQ ID NO: 215365 - DNA, 286 bp, Canis familiaris; identical to SEQ ID NO: 5258
  misc_feature (66)..(66): n is a, c, g, or t
  misc_feature (75)..(75): n is a, c, g, or t
  misc_feature (83)..(83): n is a, c, g, or t
  misc_feature (113)..(113): n is a, c, g, or t
  misc_feature (124)..(124): n is a, c, g, or t
  misc_feature (156)..(156): n is a, c, g, or t
  misc_feature (206)..(206): n is a, c, g, or t
  misc_feature (211)..(211): n is a, c, g, or t
  misc_feature (247)..(247): n is a, c, g, or t
  misc_feature (260)..(261): n is a, c, g, or t

SEQ ID NO: 215366 - DNA, 600 bp, Canis familiaris
  misc_feature (352)..(352): n is a, c, g, or t
  misc_feature (457)..(457): n is a, c, g, or t
  misc_feature (598)..(598): n is a, c, g, or t
aaaagacaaaaactgagaagagggctttaaaacgaaggcgatctaaagtccaagaccaaggaaaattgataaaaactctaatacagactaagtcaggatcattgccgagcctgcatgacataatcaaaggaaacaaagagatcaccgtgggaacatttggtgtcacagcggtctcgggacatatataaaataatagaacttttcatactggagacttttgttgttctttgaagaacagtctgtggtatttgaagggtttgggggagggagaaaatattaatgggaaaagtattcagaaattatggtttctgcctttttaaaaaaaagtaggtgggattgtgtcaatcttggntaatgagctgcagttttacaaggcttgatcactttctacaaggacaatggtagacattttataaaagatttttttttccagattaattactgggacaaacgtaanttggaagccccagttcctttgggtgggataggaatgaaagcctaaacctcttcctttactttggtcctatttcttgcaccttccatattatgtgcctttgctattataatgcccctggagaggagggagacttttttttcntt

SEQ ID NO: 215367 - DNA, 625 bp, Canis familiaris; identical to SEQ ID NO: 5260
  misc_feature (409)..(409): n is a, c, g, or t
  misc_feature (427)..(427): n is a, c, g, or t
  misc_feature (438)..(438): n is a, c, g, or t
  misc_feature (444)..(444): n is a, c, g, or t
  misc_feature (555)..(555): n is a, c, g, or t
  misc_feature (600)..(600): n is a, c, g, or t

SEQ ID NO: 215368 - DNA, 600 bp, Canis familiaris
  misc_feature (443)..(443): n is a, c, g, or t
  misc_feature (500)..(500): n is a, c, g, or t
  misc_feature (556)..(556): n is a, c, g, or t
  misc_feature (582)..(582): n is a, c, g, or t
  misc_feature (589)..(589): n is a, c, g, or t
atcgcttttgagagagcaggtcttcttttcattttcaactttcatccaagcaagagctacactgattaccgagtgggaacgacattgccaggaaaattcagaattgtgctagatacagacgcagcagaatatggaggacaccagagattggaccacaataccgattttttttctgaagattttaaacataatgagcgtcccttttctcttttggtgtacattccgagccgagtgggcctcatcctgcagaatgtggatatgcccaactgaacccacgggatttcagcttccaggaaaatgtgcgcttgttttcgtcttctcattgtcacagaagcttctagtgtgcaagcttttcaaaaatacaagttgtctagacgaaacgtcagatgtctgaaatttaatattggtttatgcaaatgaatgtcacattttgctttaagaantgcaaggggggaatagttttgaaatttcaaggaagctagactgtatttttcagcatntgagcactccgattcccaaatgaagattatatgtaaggcttaaacaacttactttntaggcggtatttgatacttaaaggtnaaattgnatatgtgcatg

SEQ ID NO: 215369 - DNA, 600 bp, Canis familiaris
  misc_feature (451)..(451): n is a, c, g, or t
  misc_feature (485)..(485): n is a, c, g, or t
  misc_feature (535)..(535): n is a, c, g, or t
  misc_feature (592)..(592): n is a, c, g, or t
ggtcgaatgattgctgaagaaatcatggagatccacagaataagagggtcatcaccttccagttgtggctccagcccattaaatatcacaagtacacctccccctgatgcctcttctccaggaggcaagaagattttaaatggagggactccagacattccttccagtggcctactaccagggcaggctcaggaaaatccaggttatccgtactcttctgatagttcctctattcttggtgagaaccctcacataggcatagacatgatagaaaacgaccaaggctcaagtagtcccagtaatgatgaagcagcaatggctgtcattatgagtcttcttggaaacaaatgctgggctgggtggtcctgttgactttagcgacttgcatggccgctgtaaacgctactgttgctttggcaacaagctacagtatcaaaagtgcattactggnggagttttacaagtctgtgaacttactggataangagagaacagcttttatgtctgtcttcataaaagcatctaaagccattgntcaagtcaatcttctattgtacttcaacaaagggactaacctgctcagggttctaanatgatatg

SEQ ID NO: 215370 - DNA, 560 bp, Canis familiaris; identical to SEQ ID NO: 5263
  misc_feature (305)..(305): n is a, c, g, or t
  misc_feature (410)..(410): n is a, c, g, or t
  misc_feature (431)..(431): n is a, c, g, or t
  misc_feature (444)..(444): n is a, c, g, or t
  misc_feature (450)..(450): n is a, c, g, or t
  misc_feature (485)..(485): n is a, c, g, or t
  misc_feature (504)..(504): n is a, c, g, or t
  misc_feature (517)..(517): n is a, c, g, or t
  misc_feature (533)..(533): n is a, c, g, or t
  misc_feature (550)..(550): n is a, c, g, or t

SEQ ID NO: 215371 - DNA, 396 bp, Canis familiaris; identical to SEQ ID NO: 5264
  misc_feature (237)..(237): n is a, c, g, or t
  misc_feature (263)..(263): n is a, c, g, or t
  misc_feature (318)..(318): n is a, c, g, or t
  misc_feature (362)..(362): n is a, c, g, or t
  misc_feature (371)..(371): n is a, c, g, or t

SEQ ID NO: 215372 - DNA, 412 bp, Canis familiaris; identical to SEQ ID NO: 5265
  misc_feature (358)..(358): n is a, c, g, or t

SEQ ID NO: 215373 - DNA, 589 bp, Canis familiaris; identical to SEQ ID NO: 5266
  misc_feature (545)..(545): n is a, c, g, or t

SEQ ID NO: 215374 - DNA, 187 bp, Canis familiaris; identical to SEQ ID NO: 5267

SEQ ID NO: 215375 - DNA, 544 bp, Canis familiaris; identical to SEQ ID NO: 5268
  misc_feature (381)..(381): n is a, c, g, or t
  misc_feature (383)..(383): n is a, c, g, or t
  misc_feature (405)..(405): n is a, c, g, or t
  misc_feature (458)..(458): n is a, c, g, or t
  misc_feature (478)..(478): n is a, c, g, or t
  misc_feature (505)..(505): n is a, c, g, or t

SEQ ID NO: 215376 - DNA, 428 bp, Canis familiaris; identical to SEQ ID NO: 5269
  misc_feature (337)..(337): n is a, c, g, or t
  misc_feature (373)..(373): n is a, c, g, or t
  misc_feature (375)..(375): n is a, c, g, or t
  misc_feature (385)..(385): n is a, c, g, or t
  misc_feature (399)..(399): n is a, c, g, or t
  misc_feature (412)..(412): n is a, c, g, or t
  misc_feature (414)..(414): n is a, c, g, or t

SEQ ID NO: 215377 - DNA, 600 bp, Canis familiaris
  misc_feature (292)..(292): n is a, c, g, or t
  misc_feature (338)..(338): n is a, c, g, or t
  misc_feature (345)..(345): n is a, c, g, or t
  misc_feature (486)..(486): n is a, c, g, or t
  misc_feature (514)..(514): n is a, c, g, or t
  misc_feature (538)..(538): n is a, c, g, or t
  misc_feature (547)..(547): n is a, c, g, or t
  misc_feature (583)..(583): n is a, c, g, or t
  misc_feature (586)..(586): n is a, c, g, or t
tggtggcagtctgggccttggtttagctgccatggggactgcacgccaagacgtgtatgatttgctaaaaacaaacctttatcaggatgatgctgtgacaggtgaagcagctggcctggccttaggtttggttatgttgggctctaaaaatgcccaggctattgaggatatggttggctatgcacaggaaactcagcatgagaagattctgcgtggtcttgcagttggcattgcattagtgatgtatgggaggatggaggaagctgatgctctcattgaatctctctggcgngataagggcccaattctttgaccaatcttggggatgtacactgaanccatggnttattgtggctcgggtaacaacaaagctattcgacgcctgctacacgttgctgtaagtgatgttaatgacgatgtccggaggcagcagtagaatacttgggttcattctgttcaggacccctgaacaggccccagcgttgnttcattgttgcagagagttacaatcctnatgtccttatggacttgctatggncctggcatntgctgtctggtccaggaacaaggaacaatcaatttntanaccgtgacaatgac

SEQ ID NO: 215378 - DNA, 600 bp, Canis familiaris
  misc_feature (301)..(301): n is a, c, g, or t
  misc_feature (328)..(328): n is a, c, g, or t
  misc_feature (359)..(359): n is a, c, g, or t
  misc_feature (377)..(377): n is a, c, g, or t
  misc_feature (387)..(387): n is a, c, g, or t
  misc_feature (497)..(497): n is a, c, g, or t
  misc_feature (555)..(555): n is a, c, g, or t
  misc_feature (559)..(559): n is a, c, g, or t
  misc_feature (582)..(582): n is a, c, g, or t
tgaggagaagtgattatctgctgtgagtagaatttgtgtaaatgttatgcacatgcaccaacccacacacagagtaaatcttttatcagctcaaaattgctgtttaatgcagagaatgattgtcttccgagtttttagttcttttttttttaactgtgttaaagtacttgaaatgtatcaactgctgactatcctttaaaaacaaaacaaaaccatttgagttgtattacagaggttgacattgttcggggatgggacaaagctttcttcaattcttttcataccacttaatgattttggngcaggcacttgaaattttcttaattantccgggaaatttaaaatccacctttcacagnatgagcataaagcccagnggcaccaagnggctgaatacaatcaaatgatattttatagcacttgactgtctgaagaaccttgggagttttaaatgatgacttcattgagcttcattcagcctgaaataaaaatgtgtntgatagatctacagcaagtgcattttgactggaaatttgatatgacctattcttactnattnttggctcttgggacatacaaaanctgaatttgtttccggcg

SEQ ID NO: 215379 - DNA, 625 bp, Canis familiaris; identical to SEQ ID NO: 5272
  misc_feature (434)..(434): n is a, c, g, or t
  misc_feature (445)..(445): n is a, c, g, or t
  misc_feature (509)..(509): n is a, c, g, or t
  misc_feature (527)..(527): n is a, c, g, or t
  misc_feature (530)..(530): n is a, c, g, or t
  misc_feature (544)..(544): n is a, c, g, or t
  misc_feature (593)..(593): n is a, c, g, or t
  misc_feature (613)..(613): n is a, c, g, or t

SEQ ID NO: 215380 - DNA, 582 bp, Canis familiaris; identical to SEQ ID NO: 5273
  misc_feature (16)..(16): n is a, c, g, or t
  misc_feature (40)..(41): n is a, c, g, or t
  misc_feature (52)..(52): n is a, c, g, or t
  misc_feature (80)..(80): n is a, c, g, or t
  misc_feature (95)..(95): n is a, c, g, or t
  misc_feature (118)..(118): n is a, c, g, or t
  misc_feature (120)..(120): n is a, c, g, or t
  misc_feature (163)..(163): n is a, c, g, or t
  misc_feature (316)..(316): n is a, c, g, or t
  misc_feature (318)..(318): n is a, c, g, or t
  misc_feature (396)..(396): n is a, c, g, or t
  misc_feature (416)..(416): n is a, c, g, or t
  misc_feature (452)..(452): n is a, c, g, or t
  misc_feature (529)..(529): n is a, c, g, or t

SEQ ID NO: 215381 - DNA, 590 bp, Canis familiaris; identical to SEQ ID NO: 5274
  misc_feature (44)..(44): n is a, c, g, or t
  misc_feature (500)..(500): n is a, c, g, or t
  misc_feature (546)..(546): n is a, c, g, or t
  misc_feature (567)..(567): n is a, c, g, or t

SEQ ID NO: 215382 - DNA, 546 bp, Canis familiaris; identical to SEQ ID NO: 5275
  misc_feature (357)..(357): n is a, c, g, or t
  misc_feature (416)..(416): n is a, c, g, or t
  misc_feature (454)..(454): n is a, c, g, or t
  misc_feature (499)..(499): n is a, c, g, or t
  misc_feature (504)..(504): n is a, c, g, or t
  misc_feature (511)..(511): n is a, c, g, or t
  misc_feature (527)..(527): n is a, c, g, or t

SEQ ID NO: 215383 - DNA, 429 bp, Canis familiaris; identical to SEQ ID NO: 5276
  misc_feature (364)..(364): n is a, c, g, or t

SEQ ID NO: 215384 - DNA, 339 bp, Canis familiaris; identical to SEQ ID NO: 5277

SEQ ID NO: 215385 - DNA, 600 bp, Canis familiaris
  misc_feature (312)..(312): n is a, c, g, or t
  misc_feature (328)..(328): n is a, c, g, or t
  misc_feature (356)..(356): n is a, c, g, or t
  misc_feature (368)..(368): n is a, c, g, or t
  misc_feature (459)..(459): n is a, c, g, or t
  misc_feature (531)..(531): n is a, c, g, or t
  misc_feature (557)..(557): n is a, c, g, or t
  misc_feature (599)..(599): n is a, c, g, or t
gaagaagatatccgcaacgccatcatggccatccggcggaaccgcgtggccctgaagggcaacatcgaaacgaaccataacctgccaccatcccacaaatcccgaaacaacatccttcgcaccagcctggacctctatgccaatgtcatccactgcaagagcctgccaggagtggtgacccggcacagggacatcgatatcctcattgtccgggagaacacagagggcgagtatagcagcctggaacacgagagtgtggctggggtggtggagagcctgaagatcatcaccaaaggccaagtcccttgccantggttaatatgccttnaaactggcccagaaaagcgggccccaanaaagtgacttgntgtgcacaaggccaacatcatgaaactgggcgatgggcttttctccatgcttgcaaggaagtggcagcccgttcccgcagatcactttganaatatatcgtggacaacaccccatgcactggtgtcgaggcccacaatttgatgtatggggatgcctaatctntacggaacattgtcaacaatgtttcncggaattggggggggccttgctttgggccgggccactttggna

SEQ ID NO: 215386 - DNA, 600 bp, Canis familiaris
  misc_feature (365)..(365): n is a, c, g, or t
  misc_feature (410)..(410): n is a, c, g, or t
  misc_feature (435)..(435): n is a, c, g, or t
  misc_feature (449)..(449): n is a, c, g, or t
  misc_feature (462)..(462): n is a, c, g, or t
  misc_feature (491)..(491): n is a, c, g, or t
  misc_feature (501)..(501): n is a, c, g, or t
  misc_feature (511)..(511): n is a, c, g, or t
  misc_feature (542)..(542): n is a, c, g, or t
  misc_feature (575)..(575): n is a, c, g, or t
  misc_feature (579)..(579): n is a, c, g, or t
  misc_feature (589)..(589): n is a, c, g, or t
ataaacgttaaaggtagttgctaggggaaaaaagtttttttgtagaagagcccccagatagaagaaaaatacatataggggagaataacttgactgatggaattatgattctaagtaatgaaagaggtctgcaagggcttacgggccaggtccctttggatgaagaaggcagtctggaaatagcctctcatttaaggaggaccttctagatatgtatcactaaagcattaagtatattatgtctagttttcacaaaaaccctgcaaacaataggtattgagacccaagaaatagcaaataacttgcctaaagctacagagttagagactaaaggcaagggagtttgacttattgtcccatattgnctcaaatgtaacctcatggacagctatgaaaattgaatagatgtncaagaaagatcttaaagcctaactntatacaaaagcttnccaaatttattgngaattgtttatacaaactaataaaaagtntgatgccttntaatacccancaaaaaaaaaaaaaagggcgggccgttttanaggatccaagcttacgtcccctgcatgcgacgnatanttttttatanggcacctaaat

SEQ ID NO: 215387 - DNA, 436 bp, Canis familiaris; identical to SEQ ID NO: 5280
  misc_feature (349)..(349): n is a, c, g, or t
  misc_feature (362)..(362): n is a, c, g, or t
  misc_feature (372)..(372): n is a, c, g, or t

SEQ ID NO: 215388 - DNA, 600 bp, Canis familiaris
  misc_feature (375)..(375): n is a, c, g, or t
  misc_feature (385)..(385): n is a, c, g, or t
  misc_feature (441)..(441): n is a, c, g, or t
  misc_feature (480)..(480): n is a, c, g, or t
  misc_feature (493)..(493): n is a, c, g, or t
  misc_feature (506)..(506): n is a, c, g, or t
  misc_feature (510)..(510): n is a, c, g, or t
  misc_feature (530)..(530): n is a, c, g, or t
  misc_feature (590)..(590): n is a, c, g, or t
atgtttgagaacattttttgggggggtgaaagagcaacgcttttaagccccctaaactttagaggagatacaatcagaaatcgatttcccccagtggaaataaaggatgatgggaggaattgagaaaatatattagtctattattttagagttctaacatactttctctaaaaccttacattattgagaaaattgagggcaaatgactgtcttatctctcttttttgacattttatggatgtaagagaatggaaatgaatggtttcaacatagatcatttaataaggcagaggatggtgtgaccaagcattcttctaaagcgttagatggaaaatgctgtgtgctgccatggtaccagaaataataacccgagangggtgtattncaggaaatcaaaagtaattccctttcatgctgagttaatgcttaaataactggtgnttctggggccacctttctttactgacatcactctttttncattaagtttaanctttgaagcaganactntgctaataattgaaaccgtnagaacccggtttagtcctatgcctactagggagttatggacatggatggttaacggcttncctcattgaa

SEQ ID NO: 215389 - DNA, 581 bp, Canis familiaris; identical to SEQ ID NO: 5282
  misc_feature (393)..(393): n is a, c, g, or t
  misc_feature (412)..(412): n is a, c, g, or t
  misc_feature (419)..(419): n is a, c, g, or t
  misc_feature (483)..(483): n is a, c, g, or t
  misc_feature (501)..(501): n is a, c, g, or t
  misc_feature (508)..(508): n is a, c, g, or t
  misc_feature (525)..(525): n is a, c, g, or t
  misc_feature (546)..(546): n is a, c, g, or t
  misc_feature (555)..(555): n is a, c, g, or t
  misc_feature (567)..(567): n is a, c, g, or t

SEQ ID NO: 215390 - DNA, 537 bp, Canis familiaris; identical to SEQ ID NO: 5283
  misc_feature (522)..(522): n is a, c, g, or t

SEQ ID NO: 215391 - DNA, 600 bp, Canis familiaris
  misc_feature (344)..(344): n is a, c, g, or t
  misc_feature (364)..(364): n is a, c, g, or t
  misc_feature (442)..(442): n is a, c, g, or t
  misc_feature (454)..(454): n is a, c, g, or t
  misc_feature (499)..(499): n is a, c, g, or t
  misc_feature (509)..(509): n is a, c, g, or t
  misc_feature (538)..(538): n is a, c, g, or t
  misc_feature (546)..(546): n is a, c, g, or t
  misc_feature (558)..(558): n is a, c, g, or t
  misc_feature (575)..(575): n is a, c, g, or t
  misc_feature (590)..(590): n is a, c, g, or t
aggagggctgattttggcattgtgaagcctggacacacacaacccaaagtgaagagcacccaccacgggtgtgttttaccaagttagcacaaattatccatatgagaatctgagctggggcttgggccgacccatgtggctgcctggggatgtataggtacaagcaaacactgagcagcaggcagactttctcctgagtttctagatctacacctggatactgcctgtatttaagagacaacaggagtaggaagggagagaggagaggacaggatgcaggacgaagcaaggcacaggacaggcatatcacatgtggccaagctataacacaggcccactttttnaaaatcttgttggttggttnctaaagtacttaatacaattggaagaagtgataagggccataaccaggaacctaagtgacagccagggagactttaanattggagcttgnacaatgccaaatactctaaaggaactgaaaacgtgatggcttttnccactgttgnctgcagttgtaaccaacaccaaagtcccnatctagtntagaagccctgntaggggcagatttgganttacaaggttctgtntctggaccaa

SEQ ID NO: 215392 - DNA, 600 bp, Canis familiaris
  misc_feature (348)..(348): n is a, c, g, or t
  misc_feature (351)..(351): n is a, c, g, or t
  misc_feature (394)..(394): n is a, c, g, or t
  misc_feature (437)..(437): n is a, c, g, or t
  misc_feature (439)..(439): n is a, c, g, or t
  misc_feature (500)..(500): n is a, c, g, or t
  misc_feature (513)..(513): n is a, c, g, or t
  misc_feature (534)..(534): n is a, c, g, or t
  misc_feature (581)..(581): n is a, c, g, or t
ccctttgtattttgtgcagtgattattttttaagatcttctttcatgtaagtagcaaacagggcttcactctcttttcatctcattaattcaattaaaaccattaccttttaaaaatcttttcttctttctaagtgtggtgtcttttatcttgaattagtagttgtatgaagtcatagataataatacacttcaccatagatcttatgtgttaggaagaacttaaatttctttaattcatttatccagatttttatgtttgaattatgcattttccagaagaggggttatctcaagaataatcatatatatgcatacctaaaaaatggcccccagggccttaattagnagnttgtaagctgcccctgctacttagttggtagagcatttgagcncacattttaattttacctaattaaaaagggcagtattttcagngncatatttaactatttagagggtgattccacctcgatggtttaatatccaaacatctgctgnaataatattttanaaaatgttggaattaaggaanaacttgggtactaatttgtataacccgatctgtgcaatggaaataanttaccaagtgttgctaaag

SEQ ID NO: 215393 - DNA, 600 bp, Canis familiaris
  misc_feature (440)..(440): n is a, c, g, or t
  misc_feature (449)..(449): n is a, c, g, or t
  misc_feature (472)..(472): n is a, c, g, or t
  misc_feature (520)..(520): n is a, c, g, or t
  misc_feature (525)..(525): n is a, c, g, or t
  misc_feature (554)..(554): n is a, c, g, or t
  misc_feature (562)..(562): n is a, c, g, or t
cagccagagggaaggccgaggggagagtgcggatgccggcacccatcaggagacccggtccaggtcaaggtccaattccaaatccaaacccaaccctccgtcagaatcacgctccagatcaaagtctgcttcaaaaacccggtctcggtccaagtccagatccaggtctgcctccagatcgccgtctcggtctagatccaggtcccactcgaggtcctaactggctacaaccacagctggaactccccgagaagtcttttgtacatgtttggtagccgtagcacaagtgatccaagtagaacatatgtcactgctgtacatttttaactcccctaatggtgtgtctacaattgttaaatctaagtgcttcctctccgtaaagccttctggtgccaggccttctgctcgatgaaaacaatcttctttttgaaaaccccctntattctggnccacagtagaatatccaaacctncgcgggccttcgcctggcctttctacagggagctagtacctggacggntttangctggaatgctgacataagtaggtaccgngagttcanccatgtttgcctcgaattgatgccctttgtgttggcat

SEQ ID NO: 215394 - DNA, 577 bp, Canis familiaris; identical to SEQ ID NO: 5287
  misc_feature (133)..(133): n is a, c, g, or t
  misc_feature (283)..(283): n is a, c, g, or t
  misc_feature (370)..(370): n is a, c, g, or t
  misc_feature (380)..(380): n is a, c, g, or t
  misc_feature (405)..(405): n is a, c, g, or t
  misc_feature (434)..(434): n is a, c, g, or t
  misc_feature (472)..(472): n is a, c, g, or t
  misc_feature (525)..(525): n is a, c, g, or t
  misc_feature (530)..(530): n is a, c, g, or t
  misc_feature (545)..(545): n is a, c, g, or t
  misc_feature (561)..(561): n is a, c, g, or t

SEQ ID NO: 215395 - DNA, 315 bp, Canis familiaris; identical to SEQ ID NO: 5288

SEQ ID NO: 215396 - DNA, 600 bp, Canis familiaris
  misc_feature (332)..(332): n is a, c, g, or t
  misc_feature (355)..(355): n is a, c, g, or t
  misc_feature (435)..(435): n is a, c, g, or t
  misc_feature (467)..(467): n is a, c, g, or t
  misc_feature (518)..(518): n is a, c, g, or t
  misc_feature (556)..(556): n is a, c, g, or t
  misc_feature (593)..(593): n is a, c, g, or t
accaactcatgagagatgatccttcaactgtaaatggtgcagaaattttaatgttgggagaaatgttgactttaccacagaattttgggaatatatttttgggagagaccttttccagttatatcagcgttcataatgatagcaatcaagttgtaaaagatatattagtaaaagctgatcttcagacaagttctcagcgtttaaatctttcagcttccaatgccgcagtggctgaacttaaacctgattgttgtattgatgatgtcatacaccatgaagtaaaggaaattggaacacacatcttggtgtgtgcagtgggctatccaactcanggtggagaaaaaatgtattttanaaaattcttcaaatttcaggttctcaaaccattggatgtgaaaaccaaattttataatgcagagactgatgaagtatttntcgaagcccagattcagaatattacaacctcnccatgttatggagaaagtttattggaaccatctataatgtcaatgtagcanaattaaactcatcagccaacttggaaatgtgtactacnttgggcaagagatatttcagccatggaacccgccgtnttgactc

SEQ ID NO: 215397 - DNA, 600 bp, Canis familiaris
  misc_feature (382)..(382): n is a, c, g, or t
  misc_feature (469)..(469): n is a, c, g, or t
  misc_feature (511)..(511): n is a, c, g, or t
  misc_feature (544)..(544): n is a, c, g, or t
  misc_feature (598)..(598): n is a, c, g, or t
ataatagctttagccttcactttcaagccttgtccggagaaaatgatgagggaatttacttcaatttgttcacttactgagtatcctaacaaaaggcatacaaagtcctatgggtgactgaaagaatcaatatttttttgctctctaagaacttctagtctaagaaagatgagaaaaggatgtgtgtgtgtgtgcacatgttaaatttaaaagtttgttccagagcccatagaaaagataattaaggaaggcttaaacagattttggggatcagtgaagttttcatggaattagcatttcagaggaccgtgaaggataggtaggattttaacccctttatttcttgctcttattatagtaaaaatgctttaaaagaaacatncaaatttgatagaaggaagatggagaaacacttgaataatcccacattggatgatggagctcactaaatgagaatgggtttgtccanctgttatatttatagttagatactctcacatctttcattttnaacattattggaacttactcctgctggcctatntaaacctggacatatacaaggacaaaaccctgcctattgagctactttctaaanaa

SEQ ID NO: 215398 - DNA, 547 bp, Canis familiaris; identical to SEQ ID NO: 5291
  misc_feature (358)..(358): n is a, c, g, or t
  misc_feature (397)..(397): n is a, c, g, or t
  misc_feature (432)..(432): n is a, c, g, or t
  misc_feature (470)..(470): n is a, c, g, or t
  misc_feature (498)..(498): n is a, c, g, or t

SEQ ID NO: 215399 - DNA, 417 bp, Canis familiaris; identical to SEQ ID NO: 5292
  misc_feature (342)..(342): n is a, c, g, or t
  misc_feature (383)..(383): n is a, c, g, or t
  misc_feature (391)..(391): n is a, c, g, or t
  misc_feature (397)..(397): n is a, c, g, or t
  misc_feature (411)..(411): n is a, c, g, or t

SEQ ID NO: 215400 - DNA, 564 bp, Canis familiaris; identical to SEQ ID NO: 5293
  misc_feature (441)..(441): n is a, c, g, or t
  misc_feature (444)..(444): n is a, c, g, or t
  misc_feature (456)..(456): n is a, c, g, or t
  misc_feature (493)..(493): n is a, c, g, or t
  misc_feature (504)..(504): n is a, c, g, or t
  misc_feature (553)..(553): n is a, c, g, or t

SEQ ID NO: 215401 - DNA, 600 bp, Canis familiaris
  misc_feature (417)..(417): n is a, c, g, or t
  misc_feature (419)..(419): n is a, c, g, or t
  misc_feature (432)..(432): n is a, c, g, or t
  misc_feature (443)..(443): n is a, c, g, or t
  misc_feature (450)..(450): n is a, c, g, or t
  misc_feature (472)..(472): n is a, c, g, or t
  misc_feature (485)..(485): n is a, c, g, or t
  misc_feature (490)..(490): n is a, c, g, or t
  misc_feature (516)..(516): n is a, c, g, or t
  misc_feature (562)..(562): n is a, c, g, or t
  misc_feature (597)..(597): n is a, c, g, or t
gagagtacctgattgagaagctgcttacaagaaccccagacatagcccaaagagccaaaaaggtgagaagagttcctgggtcgagtggtcaccttcataaaaccgaggacggtgactgggagtggagtgacgacgagatggatgagaaaagtgaagaagggaaggcagccttttctcaagaaaagtcacgaagagtaaaagaagaaaatccagagatggcggtgaatgccagcagtatacccgagcaaatacagtccctctctgtgcaggactctcagggcctacccaatgctagtgaagactatagagaaacttcttgtgctgtgaacctcgttttaaggattaagaaactccagaaaggacttaatgacatacggttgagtttactccaggaagaaataccgcagatggtgtatntnaggagctcttctntgttgcttggntgatggncatgatgtaattataggggtgntaatttacagaanatgtngatgatcccaaactttaaaacattgncgttaaattggcttcaggcttggatgggcggagattcttgagaaangaactgatcggtttgttaattggtgtaactgtttntgt

SEQ ID NO: 215402 - DNA, 508 bp, Canis familiaris; identical to SEQ ID NO: 5295

SEQ ID NO: 215403 - DNA, 600 bp, Canis familiaris
  misc_feature (426)..(426): n is a, c, g, or t
  misc_feature (485)..(485): n is a, c, g, or t
  misc_feature (511)..(511): n is a, c, g, or t
  misc_feature (528)..(528): n is a, c, g, or t
  misc_feature (555)..(555): n is a, c, g, or t
  misc_feature (565)..(565): n is a, c, g, or t
  misc_feature (586)..(586): n is a, c, g, or t
tcatcatgtccagagccgaactaatttccacaaaattccccgaatccacatccccttctgtatttggtatctaagtggataacactgccattcgcctttcacaaaataaacttgagtgtggattgaacgtcttccttcaaacaccacaccttatacattttacaccctaactatctgttgagttgaccttctcttctccatgttcggtaccactattcgtttccttcattactatttcttgcctgtgttactataagagaccccaagcggtcctcttgtctccatttccacctttgtgtttatccagaagacccttctaatgatagatcagatttcacgtcctcatggtaaatattcttcagtggcatgcattctatactgtcagggcaaaagccaagcaccaagcgtaggcacaccataacctgncaagaatgcagattaagactgattctgtcattccgtagccttatgtattacacttcttntgcatattccgcttgggtaattaaanaaccggctgggttgaanaacaccgtgattttacccattgatggnggatgggggnggtttaacatctagctactantgaataggcttgga

SEQ ID NO: 215404 - DNA, 570 bp, Canis familiaris; identical to SEQ ID NO: 5297
  misc_feature (315)..(315): n is a, c, g, or t
  misc_feature (390)..(390): n is a, c, g, or t
  misc_feature (423)..(423): n is a, c, g, or t
  misc_feature (435)..(435): n is a, c, g, or t
  misc_feature (478)..(478): n is a, c, g, or t
  misc_feature (481)..(481): n is a, c, g, or t
  misc_feature (527)..(528): n is a, c, g, or t
  misc_feature (551)..(551): n is a, c, g, or t
  misc_feature (553)..(553): n is a, c, g, or t

SEQ ID NO: 215405 - DNA, 600 bp, Canis familiaris
  misc_feature (344)..(344): n is a, c, g, or t
  misc_feature (365)..(365): n is a, c, g, or t
  misc_feature (426)..(426): n is a, c, g, or t
  misc_feature (441)..(441): n is a, c, g, or t
  misc_feature (463)..(463): n is a, c, g, or t
  misc_feature (498)..(498): n is a, c, g, or t
  misc_feature (534)..(534): n is a, c, g, or t
  misc_feature (539)..(539): n is a, c, g, or t
  misc_feature (565)..(565): n is a, c, g, or t
  misc_feature (591)..(591): n is a, c, g, or t
  misc_feature (596)..(596): n is a, c, g, or t
ccctcctgcagctgaaaggcctcgaggacagctatgaaggcagtatgacctttccaactgggaggtttaccatcaaacccttggggttcctcctgttgcagctctctggggacctgggagacttagagccagccctgaataagaccaagaccaagcacgttatgggctctggctcctgctctgccctcatcaagctgttgcccggccagagtgacctcctgattgcccacaacacctggagctcctaccagaacatgctgcggatcatcaagaagtactggttccagttccgggaagacccccaagagaactcttccctggctctggcaacaaagctgggcttntcatcctaccctggcaccctnttttctgggatgacttctacatcatggcagcggactggtgaccctggaaactaccatcggnaacaggaacccactntgtggaagttgtgcagcccaanaacttgtgtgctggatgggtgcgtaatgttgtggncaacccttggcttggatggggactctggcagacatnttaanaaattaaaaggggcgtcaaaaaccanggatgacggggatataaggatttttncctgngggc

SEQ ID NO: 215406 - DNA, 423 bp, Canis familiaris; identical to SEQ ID NO: 5299
  misc_feature (129)..(129): n is a, c, g, or t
  misc_feature (171)..(171): n is a, c, g, or t
  misc_feature (178)..(178): n is a, c, g, or t
  misc_feature (198)..(198): n is a, c, g, or t
  misc_feature (221)..(221): n is a, c, g, or t
  misc_feature (228)..(228): n is a, c, g, or t
  misc_feature (249)..(249): n is a, c, g, or t
  misc_feature (286)..(286): n is a, c, g, or t
  misc_feature (345)..(345): n is a, c, g, or t
  misc_feature (366)..(366): n is a, c, g, or t
  misc_feature (417)..(417): n is a, c, g, or t

SEQ ID NO: 215407 - DNA, 586 bp, Canis familiaris; identical to SEQ ID NO: 5300
  misc_feature (459)..(459): n is a, c, g, or t
  misc_feature (476)..(476): n is a, c, g, or t
  misc_feature (498)..(498): n is a, c, g, or t
  misc_feature (519)..(519): n is a, c, g, or t
  misc_feature (539)..(539): n is a, c, g, or t
  misc_feature (557)..(557): n is a, c, g, or t
  misc_feature (559)..(559): n is a, c, g, or t
  misc_feature (566)..(566): n is a, c, g, or t

SEQ ID NO: 215408 - DNA, 600 bp, Canis familiaris
  misc_feature (481)..(481): n is a, c, g, or t
  misc_feature (509)..(509): n is a, c, g, or t
  misc_feature (518)..(518): n is a, c, g, or t
  misc_feature (539)..(539): n is a, c, g, or t
  misc_feature (556)..(556): n is a, c, g, or t
ccctccctaaatccatcctgttcggtctgttttcattttcacttgtgttcagtgctctcgcgcgcgcgtgtgcgtgtgtgtgtgtgactgctctccgcagcttctgggtgtcgtgacttaattctcccacttgaggctctctcgcgcccgccgtctccccagtcccggcgatctcccatcctaggcgatgtctagcctggtttgaccgcccttttcccggggaatggcaagtctttcacctgccgcacacattcccagatccacagactgatgatcctctccccaagaaggctaccacaggagctgtcttctgagactctggatacctttattcttcaaatggctttacccttctcatagctccagggaccctccattctctgtatctaggaaaatgtgatgagttacaggtatcagcttctagatcaccaagcacttcgtgttctagccacaagtggctcgagtggaagatcaaggggcnacaaggtgcatcaggaagatgcctaaanaacaaggangaggagaagctgggggaaaanagccgtgcagataccanatcaaagaatcggacaaagaagaggaaccgccagctgctttacc

SEQ ID NO: 215409 - DNA, 600 bp, Canis familiaris
  misc_feature (379)..(379): n is a, c, g, or t
  misc_feature (385)..(385): n is a, c, g, or t
  misc_feature (427)..(427): n is a, c, g, or t
  misc_feature (448)..(448): n is a, c, g, or t
  misc_feature (458)..(458): n is a, c, g, or t
  misc_feature (463)..(463): n is a, c, g, or t
  misc_feature (477)..(477): n is a, c, g, or t
  misc_feature (505)..(505): n is a, c, g, or t
  misc_feature (512)..(512): n is a, c, g, or t
  misc_feature (514)..(514): n is a, c, g, or t
  misc_feature (549)..(549): n is a, c, g, or t
  misc_feature (551)..(551): n is a, c, g, or t
  misc_feature (572)..(572): n is a, c, g, or t
  misc_feature (577)..(577): n is a, c, g, or t
  misc_feature (580)..(580): n is a, c, g, or t
gcaccctgcgtgcttaagccctcagtggctccaggcgcaaagggagaggcttcagggagcatgtgtggtccacaaagctgagcgagacggggtggtcagagcctgcagctggggctgaggaccagtcctgcttcctgagcctctttgctctgccccttggggcaagttgcttaacctgtctgtgtgttggtacctctgcctccctgatgtagtctctcctttgactacctctccccacagaggggcaagagcccacccaaaggagcagggaggccagtctctgaggacagcaccgcagggcccaggggcagctgcctcccaccttgcctggcttttggtgaacggaacccatcatttcctgaggttcagtttaagggcnaaccangtcttttcctttgtccattgcctctgccctgggaggtgggangcatctggtccacctcctttnctggcaagtnccaangtctggagaagtgnccgcctgtccgaaaggcagccagtgccnacgctgntnacccctgctaggggtatctggaaacctggggccananactgctttcatagttttcccngaacncanccctttaggaaaagggttgg

SEQ ID NO: 215410 - DNA, 600 bp, Canis familiaris
  misc_feature (402)..(402): n is a, c, g, or t
  misc_feature (480)..(480): n is a, c, g, or t
  misc_feature (503)..(503): n is a, c, g, or t
  misc_feature (521)..(521): n is a, c, g, or t
  misc_feature (543)..(543): n is a, c, g, or t
  misc_feature (579)..(579): n is a, c, g, or t
  misc_feature (598)..(598): n is a, c, g, or t
tatgagaaaaatgacaaatagaacgttttagtttttttgttctaaaaagggacattttaagcacccttttaaaaatctccaatgtggggtgcctgagtggctcagttagttaagcatctgcctttggctcaggtcatggtcccaggacccttctgagtcccacatcaggctccctgctcctcaaggagcctgcttctccctctctgcctgctgctcctatctctctctgtcaaataaataaaaataaaaataaataaaaaataaaattaaaatatacaattgtacaatgtaactaaaaatactaaaaactttttgagtaggtcattggagggttttattctttatggatgaaacacattacccattatttagatattagaggtttttatgccaatttttatnacaacaaacagcttcactctacttttcacattctctggtgtcatacacactgcatttcttaggctactcgttcctttnagagccacatagtaatgcatctntaagtcacattacttggnaacatagtccacattactcctntagcaagatggatcacctggactgggtttttacagnacactggctagtctgtttntg

SEQ ID NO: 215411 - DNA, 600 bp, Canis familiaris
  misc_feature (398)..(398): n is a, c, g, or t
  misc_feature (475)..(475): n is a, c, g, or t
  misc_feature (562)..(562): n is a, c, g, or t
  misc_feature (577)..(577): n is a, c, g, or t
ctgtgtttggaatttgatgaagtcaaggtcagtcaactcctaaagaagctctcagaggtagaagaaagtatcagcacactgatgcagccagcctagctgaagatggagttgttgaagcaaaggtgttcatgatccctccccagtgacctgcgatttttttttttttaatcttattcacccattttattaaatccccaaattcaaatctgtttgtctcacttgctgagatttcttttgtctttctctttcattcattcttacagttgtactacttgtagaggttctaaaactttagcatgcagagtgctcataaaagcaccttgagatcaagagtcacctgcttcactgagtaagccagcccggttccccattataaaagcattttaaaaaggcttaanggccatatccctagacacttgaattcagtaggactaggtggagtcaacttcaggaacccttactatggtgggtcggntcctggagtaggatttccttaaatcatgggaagaaattagaaaaaggggggaccaaaacattttttttatgccaatacaaggctgancaaaagccatgtgtnttgggctgaggcttaaaagcctg

SEQ ID NO: 215412 - DNA, 600 bp, Canis familiaris
  misc_feature (450)..(450): n is a, c, g, or t
  misc_feature (496)..(496): n is a, c, g, or t
  misc_feature (512)..(512): n is a, c, g, or t
  misc_feature (534)..(534): n is a, c, g, or t
  misc_feature (543)..(543): n is a, c, g, or t
  misc_feature (571)..(571): n is a, c, g, or t
  misc_feature (581)..(581): n is a, c, g, or t
ccttgactgattgcatagagattgcttgtaggcagcacaagaccaaacctcagtcttttgcccttactggcccagatcttcagtttctgaatccctctgcctgcccatctggtctgttgccattctgtgacttttgcttaatcccaatattttgccttttttcctccctatgtcaaagccctttttaattaccagggatgtttagccccagatcccccctatgccataacatttaaaaggctgagaaatgtggggccccactgatgtggtaggtgatcaatatgcatcttctagagacacattgaccagatgagggcctgaaatggcagtcctttagagacgctcattgcctgtgagagtctctggcaggtcactgtcatttttggaatgtacatttctaaatgtacatttggaatggagaaagaggaattctactaaaacaacaacagncaccacaaaaccccagcccccagaccacccagaatagtgatgaggncatttaaatatgctgnctggtgctatgcttcttcatgnactcattanctagggtccccttaggtttcgctggggnctcgcaagcnccaagcatttggctttggg

SEQ ID NO: 215413 - DNA, 576 bp, Canis familiaris; identical to SEQ ID NO: 5306
  misc_feature (503)..(503): n is a, c, g, or t
  misc_feature (570)..(570): n is a, c, g, or t

SEQ ID NO: 215414 - DNA, 234 bp, Canis familiaris; identical to SEQ ID NO: 5307
  misc_feature (53)..(53): n is a, c, g, or t
  misc_feature (210)..(210): n is a, c, g, or t

SEQ ID NO: 215415 - DNA, 350 bp, Canis familiaris; identical to SEQ ID NO: 5308

SEQ ID NO: 215416 - DNA, 600 bp, Canis familiaris
  misc_feature (166)..(166): n is a, c, g, or t
  misc_feature (316)..(316): n is a, c, g, or t
  misc_feature (509)..(509): n is a, c, g, or t
  misc_feature (512)..(512): n is a, c, g, or t
  misc_feature (521)..(521): n is a, c, g, or t
  misc_feature (561)..(561): n is a, c, g, or t
  misc_feature (581)..(581): n is a, c, g, or t
  misc_feature (595)..(595): n is a, c, g, or t
ttaatttacctggaccttttctccttatctttgatgtaaagatatggtacaaacccttttcagagccattatgtggaactactttaaagaatggatattaagttattacctccatgtctccagtcacataattgaataatatccatcttttttttcccttacggtnaaaggaaataaatgaaatatataaaattatcagcttcctggaatcattgcagtgcctatatatatatacgattaggaatactcagtttccctatttccaagttacatattagaatgtaacagtgaaatttaacagtgaaatttctgggcntgtggaatacatttcatggtttacaaataagagagaaattgtcagagaaatctgtagacgttaggcacttttgaaaatcatttactttttcaaggagtaaaaaggaatccacctcacccaaagcctgagcagttcttgcctttgtctttggatgaattgaaatgaaattaattcaggcatcaagccaattctnttnctagtcctnccttttcagcccaaaaaaaaaaaaaaaagggcgggcgctntaaagatccagcttcgtacncgtgctgcgacgtnttaac

SEQ ID NO: 215417 - DNA, 577 bp, Canis familiaris; identical to SEQ ID NO: 5310
  misc_feature (569)..(569): n is a, c, g, or t

SEQ ID NO: 215418 - DNA, 207 bp, Canis familiaris; identical to SEQ ID NO: 5311
  misc_feature (141)..(141): n is a, c, g, or t
  misc_feature (146)..(146): n is a, c, g, or t
  misc_feature (151)..(151): n is a, c, g, or t
  misc_feature (178)..(178): n is a, c, g, or t

SEQ ID NO: 215419 - DNA, 600 bp, Canis familiaris
  misc_feature (217)..(217): n is a, c, g, or t
  misc_feature (228)..(228): n is a, c, g, or t
  misc_feature (358)..(358): n is a, c, g, or t
  misc_feature (384)..(384): n is a, c, g, or t
  misc_feature (398)..(398): n is a, c, g, or t
  misc_feature (444)..(444): n is a, c, g, or t
  misc_feature (446)..(446): n is a, c, g, or t
  misc_feature (482)..(482): n is a, c, g, or t
  misc_feature (515)..(515): n is a, c, g, or t
  misc_feature (520)..(520): n is a, c, g, or t
  misc_feature (543)..(543): n is a, c, g, or t
  misc_feature (548)..(548): n is a, c, g, or t
  misc_feature (568)..(568): n is a, c, g, or t
  misc_feature (586)..(586): n is a, c, g, or t
tgatgcactccatgtttttgactggatcaaagcccggagtggagacaaccctgtgtatatttggggtcattccctaggcactggggtggcgacaaatctggtgcggcgcctctgtgagcgagagacacctccagatgcccttatattggaatctccattcactaatatccgtgaggaagctaagagtcatccattctcagtgatatatcgatacttncctgggtttgntctggttcttcctcgaccccattacaagcagcggaattaaatttgcaaatgatgaaaatgtgaagcacatctcctgctccctgcttatcctgcacgcggaggatgacccggtcgtgcccttccagcttgntagaaagctctacaacatcgctgctncatctcgaagcttncgagacttcaaagttcagtttatccccttttcactcagaccttggntncaggcacaagtacatctacaggagcccctgagcttncaccggatactggaggggagttcctgggggaantcaanaacccgggcgccagcactgaatnctggntgcctgaagggaacatgaanacctttggccttcccgtntgctgggggccgcc

SEQ ID NO: 215420 - DNA, 420 bp, Canis familiaris; identical to SEQ ID NO: 5313
  misc_feature (261)..(261): n is a, c, g, or t
  misc_feature (315)..(315): n is a, c, g, or t
  misc_feature (318)..(318): n is a, c, g, or t

SEQ ID NO: 215421 - DNA, 600 bp, Canis familiaris
  misc_feature (395)..(395): n is a, c, g, or t
  misc_feature (432)..(432): n is a, c, g, or t
  misc_feature (451)..(451): n is a, c, g, or t
  misc_feature (464)..(464): n is a, c, g, or t
  misc_feature (479)..(479): n is a, c, g, or t
  misc_feature (500)..(500): n is a, c, g, or t
  misc_feature (502)..(502): n is a, c, g, or t
  misc_feature (517)..(517): n is a, c, g, or t
  misc_feature (529)..(529): n is a, c, g, or t
  misc_feature (561)..(561): n is a, c, g, or t
  misc_feature (574)..(574): n is a, c, g, or t
  misc_feature (583)..(583): n is a, c, g, or t
gcatcttccctgccagctacgtgcaggtgtgccgtgagccccggctccggatcagtgacgatggtccccagctccccgcgtcaccgcgcctgaccaccaccgcccatctggctcggcactccagctccccattgacaccacacagcccaggtgatcccaccgactgggggagccggacctccccccgccgcactggcttctccttccccacccaggagcccagagcccagacccagggtctcagcacccctgggtcaactctgtcccatcctggagactccagccgtcccctggacctggggacccccaccaccaccactcagatacactggaccccgtatcgggcgatgtaccagtacaggccccagaatgaggatgagctggagctacagganggggatcgggtggatgtcatgcagcagtgtgatgacngctggtttgtgggtgtctntcggaggacccanaagtttgggacattncctggaaattatgtagcttcngngtgagtcgtcttcgnggcaactcaaancccaaccaggatggggtgcgggagcagtagcncttacaggaaggnaaaaaggtnccccttcattcttttcc

SEQ ID NO: 215422 - DNA, 543 bp, Canis familiaris; identical to SEQ ID NO: 5315

SEQ ID NO: 215423 - DNA, 600 bp, Canis familiaris
  misc_feature (507)..(507): n is a, c, g, or t
  misc_feature (521)..(521): n is a, c, g, or t
  misc_feature (577)..(577): n is a, c, g, or t
gggtcattaagggtcacagcaaatccatccagtgtctgacggtgcataaaaacggcggcaagtcctatatctactccgggagccacgatggacacattaattactgggattcagagacaggggagaatgactcctttgctgggaagggccacacgaaccaggtgtccaggatgacggtggacgaatctgggcagctggtgagctgcagcatggatgacacagtgcggtacaccaacctcacgctgagggactacagtggtcagggagttgtgaagatggacatgcaaccaaagtgcgtggctgttggccctggaggctatgctgtagtcgtgtgcatcgggcagatcgtcctgctcaaggatcagaagaagtgcttcagcatcgacaacccaggctacgagcccgaagttgtggcagtgcaccccagcggtgacatggtggctgtcgggggcacggacgggaatgtccgcttgtactccattctgggcaccacgctgaaggacgaangccgggtcctggangccaagggccctgtgaccgacgtggcgtatttccacgatggcgcctttctcgccgngtgtgatgccagcaagggggtca

SEQ ID NO: 215424 - DNA, 548 bp, Canis familiaris; identical to SEQ ID NO: 5317

SEQ ID NO: 215425 - DNA, 600 bp, Canis familiaris
  misc_feature (525)..(525): n is a, c, g, or t
  misc_feature (551)..(551): n is a, c, g, or t
  misc_feature (568)..(568): n is a, c, g, or t
tttcatcagtgatcaaattgttctgtatgctgccaagtacagcagccactaaccagatgtagctattgagaatcttaaatgtggccaagtgcaacctaggaactagatttttaattttatttcaattaaactcaaatactcacacagagctggtggtggctgtagtaacagtacagttctagagatgcccatgagtgtagtgaaggctgaattaagcactttttttcccctgcagtggttaagagtacagactctgtaaccaactgcttagatttgattcctaactccatcacgtattagctgtgtggcattggcaagttacttaaattctctgagcctcatctgtgaaacagggatagtaacagtatctacctaaaggtggttatgaggatcagatcaatgaatagatgtaaagtcttgcaactatgtccagcatcccatcaggatgttatgtcacattgaagcatgtggggagtcccaagcaccagagcttctgtccccaaggagttgagatcattcaacttncctttggggatgtcttcacctacctncctttactattggcagnttatgggaggctgagccaaggaataacttggg

SEQ ID NO: 215426 - DNA, 600 bp, Canis familiaris
  misc_feature (81)..(81): n is a, c, g, or t
tctgagcctgaaaccttgaaaacagattcagactgcagttataaatgtgtggatcatctgcataaagacggcagccaaggnaagataactttgtgatctgagcgagaagaaaagtggggctctaggagagaaacagaggaataccaccctgagttttgatagaaaaagagcctccaaaggaggaagccagaggtgtgtggtgttgtgggagctaagctaaggacaagcttcaaaaaggtctgacctgctagcagtgcacatgctattgagctgtcaccggagacaagtaatgagaaatgtgccttggttatgacagtggtgcattcattgcagtctttggcaaagtgccatttagctgaagactaagggtaacagaagccagattgcctgaggctgaaggataaacaggaagtgaggataaggagatagggagtgcaaatgactatttaaaggttagctcaagagaggaggaaagagatagcaaagtaagaacagcgggatggaggattgagaaaagaattttttaagatgggaaagacttgagcatgtttactgatggggagagaccaaattgaggtaggtgggagagatcaaattgag

SEQ ID NO: 215427 - DNA, 216 bp, Canis familiaris; identical to SEQ ID NO: 5320
  misc_feature (15)..(15): n is a, c, g, or t
  misc_feature (35)..(35): n is a, c, g, or t
  misc_feature (98)..(98): n is a, c, g, or t
  misc_feature (204)..(204): n is a, c, g, or t
  misc_feature (207)..(207): n is a, c, g, or t

SEQ ID NO: 215428 - DNA, 600 bp, Canis familiaris
  misc_feature (16)..(16): n is a, c, g, or t
  misc_feature (18)..(18): n is a, c, g, or t
  misc_feature (117)..(117): n is a, c, g, or t
  misc_feature (119)..(119): n is a, c, g, or t
  misc_feature (152)..(152): n is a, c, g, or t
  misc_feature (253)..(253): n is a, c, g, or t
  misc_feature (433)..(433): n is a, c, g, or t
  misc_feature (442)..(442): n is a, c, g, or t
  misc_feature (444)..(444): n is a, c, g, or t
  misc_feature (467)..(467): n is a, c, g, or t
  misc_feature (483)..(483): n is a, c, g, or t
  misc_feature (505)..(505): n is a, c, g, or t
  misc_feature (519)..(519): n is a, c, g, or t
  misc_feature (529)..(530): n is a, c, g, or t
  misc_feature (560)..(560): n is a, c, g, or t
  misc_feature (571)..(571): n is a, c, g, or t
  misc_feature (578)..(578): n is a, c, g, or t
  misc_feature (589)..(589): n is a, c, g, or t
  misc_feature (597)..(597): n is a, c, g, or t
catgggagccttgggncngtctgtctcgtggagcctgaaactggggcctaactgcagtcacctcccttctttgggcagtagaaacactttcaaaacccaaatctggtcataatctantngcatcccggctttttgtctgaggggtcatctgnctgcatctcctccacggctgtcccaccctagaatgtgacttccctcctcaggaacctgcaggagactccaggaattttctgggggttggctctccatttgncagcctctcctccctaaggtgtccaggtggcagagttgtacagagcagctttctccccagtggctgcagcaggcgggcatgctgtcaggccattggaggaacctcagctcggctcctcaggcacctttcagggtgtagcttgggcctaaggagccacatgagaaaggatcctagcccggnagaggctgngngggactcgcccctggccccccanctgggccctttggacnggtggcacaccacctgcggcantattgccctgtccncggcgcaggnnaaatactacctgcccttccttgctcccaangccacttttcnaaagatncctccctggcnaattaaancaa

SEQ ID NO: 215429 - DNA, 600 bp, Canis familiaris
  misc_feature (533)..(533): n is a, c, g, or t
  misc_feature (541)..(541): n is a, c, g, or t
  misc_feature (568)..(568): n is a, c, g, or t
cattctgcagaagctgcccgtgggcaccacggccacactctacttccgggacctgggggcccagatcagctgggtgacggtcttcctgactgagtacgcagggcccctctttatctatctgctcttctacttccgcgtccccttcatctacggccacaaatacgacttcacgtccagccggcactcggtggtgcacctcgcctgcatctgccactcattccactacatcaagcgtctgctggagacgctcttcgtgcaccgcttctcccatggcaccatgcccttgcgcaacatcttcaagaactgcacctactactggggctttgccgcctggatggcctattacatcaaccatcctctctacacgccccctacctacggagctcagcaggttaaactggcactggccatcttcgtgatctgccagcttggcaacttctccatccacatggccctgcgagacctgcggccagcggggtccaagaccaggaaaaatcccataccccaccaagaaccccttcacgtggctcttnctgctggngtcctgccccaactacacctacgaggngggggtcctgggattggctttgccatcatgac

SEQ ID NO: 215430 - DNA, 600 bp, Canis familiaris
  misc_feature (349)..(349): n is a, c, g, or t
  misc_feature (374)..(375): n is a, c, g, or t
  misc_feature (394)..(394): n is a, c, g, or t
  misc_feature (423)..(423): n is a, c, g, or t
  misc_feature (448)..(448): n is a, c, g, or t
  misc_feature (487)..(487): n is a, c, g, or t
  misc_feature (508)..(508): n is a, c, g, or t
  misc_feature (566)..(566): n is a, c, g, or t
accggaacccctactatgggggtgagagctcctccatcacacccctggaagagctctataagcgttttcaattgctggaggggccccctgaggcaatgggcaggggccgagactggaacgttgacctgatcccgaagttcctcatggccaatgggcagctggtaaagatgctgctgtatacagaggtgacgcgctacctggacttcaaggtggtggagggcagcttcgtctacaaggggggaaagatctataaagtgccatccactgagaccgaagccttggcttccaatctgatgggcatgtttgagaaacgccgtttccgcaagttcctggtatttgtggcaaactntgatgaaaatgaccccaagaccttnngagggtgttgaccccccanagcaccagcatgcgtgacgtctacccggnaagttttgacttgggccaggatgtnattgactttatctggccatgcccttggcccttttaccgnactgatgactaccttggaacnaccctgtctttgagaccattcaaaccgcatcaagtttgtacagtgaagtcccttgggnttcggttttgggaaaagaatccttttttttttac

SEQ ID NO: 215431 - DNA, 600 bp, Canis familiaris
  misc_feature (387)..(387): n is a, c, g, or t
  misc_feature (436)..(436): n is a, c, g, or t
  misc_feature (445)..(445): n is a, c, g, or t
  misc_feature (471)..(471): n is a, c, g, or t
  misc_feature (495)..(495): n is a, c, g, or t
  misc_feature (561)..(561): n is a, c, g, or t
  misc_feature (573)..(573): n is a, c, g, or t
atctgtatgaaattccagcagttaatttgaacatttatttatatgatgtttgtatttttaggtctttaatacagtgtttctacctctcatttgtaactgcatgcattactctcgaaactaggtaaaactcacggaattgttgtgtactagcctttttattcctgtgtgtacagatgtatattaaggtaaaataaaactgacaaagtgtttctagggtaaagctgggtccatattacatggctcttcaggccaggtccttcctcagtgagtttggaggcttggtcattaatatcctttgtcctgcccccagatttcagatgctcagcctgtcatgcaggctaccactcgtgtagactacatgatgagggttctggcccctccctgcangggttataaacatcgttagtaggaatactgttttgtatcactttttcangtgtcccangcaatttcattttatgttctcacagntctcacccacgttatcttcttcanggggggctgggttcagtctgggcccttcggcttccaaactggttttttggtttggtttggtttggnttggtttggttnggtttgggtttggtttggtttaaaaaa

SEQ ID NO: 215432 - DNA, 600 bp, Canis familiaris
  misc_feature (346)..(346): n is a, c, g, or t
  misc_feature (405)..(405): n is a, c, g, or t
  misc_feature (437)..(437): n is a, c, g, or t
  misc_feature (457)..(457): n is a, c, g, or t
  misc_feature (479)..(479): n is a, c, g, or t
  misc_feature (482)..(482): n is a, c, g, or t
  misc_feature (511)..(511): n is a, c, g, or t
  misc_feature (518)..(518): n is a, c, g, or t
  misc_feature (533)..(533): n is a, c, g, or t
  misc_feature (591)..(591): n is a, c, g, or t
gaccctttgaaggatctctaaaagctggtgccaaaggtcacttcccttgctcgccctctgctttcgagcctgacagccttgcccctcctaggtctcgaggcaggtgctgggagcggggtcaccggggcttgggcatccagagcgggaaccggacgatgcgcgtttccctgcttggggttcggtgggaacctggggcgtgcttcaggtaccatagagtcccgtccatggggttcacaccgagccattcagatcctccccccattcttccccagtggggcactttgcccgagaggatgtccgtgtatcccagttcctgtgcaaccgaagatgggttgatttccctttnctgccatcccgagtcccgtcagatggcaagtgtgtgtgcgcaccagcacgtgcttgtangttggtcgtagtttttgacagaagggcctgcngctctgctcttgaaaatggncttctccttttatgctggctgncanagccgactcggagtcttgaccctttccanccattangtgcaccccccctgnctgactgctgagttcggtccctacggagctaacattctgaacagccggctgtaaaggnccagtgggg

SEQ ID NO: 215433 - DNA, 600 bp, Canis familiaris
  misc_feature (459)..(459): n is a, c, g, or t
  misc_feature (463)..(463): n is a, c, g, or t
  misc_feature (466)..(466): n is a, c, g, or t
  misc_feature (543)..(543): n is a, c, g, or t
  misc_feature (549)..(549): n is a, c, g, or t
  misc_feature (551)..(551): n is a, c, g, or t
  misc_feature (568)..(568): n is a, c, g, or t
  misc_feature (594)..(594): n is a, c, g, or t
tctttgactttgtttccgacccactaagtgacctaaagtggaaggaagtaaaacgagccgctctaagtgaaatggtggagtatatcacccataatcggaacgtgatcacagagcctatttacccagaagtagtccacatgtttgcagttaacatgtttcgaacgttaccaccttcctccaatcctacgggagcagaatttgaccccgaggaagacgagcccacgttagaagcagcctggcctcatctacagcttgtttatgaatttttcttaagatttttagagtctccagatttccaacctaatatagcgaagaaatatattgatcagaagtttgtattgcagcttttagagctctttgacagtgaagatcctcgggagagagattttcttaaaactacccttcacagaatctatgggaaaattcttaggcttaagagcttacatcagaaaacagatnaatnatntattttatagggtttattttatgaaacaggagcatcacaacggcatagcagaattactgggaaatcttgggggagtntaattnanggggattggccttaccncttaaaagaagaggcccaggattttnttactg

SEQ ID NO: 215434 - DNA, 600 bp, Canis familiaris
  misc_feature (579)..(579): n is a, c, g, or t
gtatagagtgattattttggatatgcaacttaaaatggaaaagttgaaatttggggtaatacaaattttaaaagacattttagaaacctttcaaatattgagaggtatttcttaaaaactcaaaaatatctaatgagccccttttcttatggaaacaaggaaaataaatgagacaaaagtggtctatgggtgagataattttccctcagtttattcctcaaaagtatgttgattttccagctgtaagctttctttctgcatacatgcatgcatctatacaaatggataatgttaccttatgaatttgccaagacctaaaatgtaaatataagcaggatatgatcaaaacaaaatgaacaaaagacaaaagaagcaatgcattattggctagacattccttttaagtccaatatcaaaggaaactggatataagcagtaacaggtgcaatggagtagacggagactctcttcagccgattttgccatttgtctgtgtaaatacagctacataaagcctgtaactacttgtgcgtagctacaaatctaagcatgtgtatatacacatatgtatttaatagnggtggttactatttataattt

SEQ ID NO: 215435 - DNA, 600 bp, Canis familiaris
  misc_feature (445)..(445): n is a, c, g, or t
  misc_feature (584)..(584): n is a, c, g, or t
  misc_feature (597)..(597): n is a, c, g, or t
ccctaaatctgctgagtaacctagctgatctctgactgcctgaagcggttttttgaaaaagagcccactgagtctgccctggactgagttggaatctccaaacgggaaccaagaacctacatcaactccccagaatctcctgctccctgaggacacccaggactaaggaagatgagggagggagggagggctgggtctgcagtggaggagctgaactggctctgcagggacctctgggatagggagaggtgcccaaggtacagaaccttgtacccttcctggctaggccattccctgctgttacagtgggtgggaggccccctgctctgcaggccccccaacttgggagtgggcactgctggtgccagtcttgcaggtagcccgtggacaaaaggtgaccagcctgacagcctgcctggtggaccagagccttcgtctggactgncgccacgagaatgctaccaccttgcccatccagtatgagttcagcatgacccgggagaaaaagcagcacgtgatctatggcactggggggggtaccagaaacactcataccgcttccgaaccaatttcaccagcaagtncaacatcaagggncct

SEQ ID NO: 215436 - DNA, 600 bp, Canis familiaris
  misc_feature (500)..(500): n is a, c, g, or t
  misc_feature (507)..(507): n is a, c, g, or t
  misc_feature (525)..(525): n is a, c, g, or t
  misc_feature (550)..(550): n is a, c, g, or t
  misc_feature (559)..(559): n is a, c, g, or t
  misc_feature (572)..(572): n is a, c, g, or t
gttggcagccacccagagaccccccacccaacctgccctactttgtgcggcgctctcgaatgcacaacatccctgtctacaaggacatcacacatggcaaccgccagatgactgtgatccgaaaggtggagggagacatctgggccctgcagaaggatgtggaagattttctgagtctactgctggggaagacacctgtcacccagatcaatgaggtgacaggtaccttacgggtcaaaggctactttgaccagcagctcaaagcctggctcctggagaagggcttctgaggctcagctgagcagcctgaataatagcatcccccacagactagagtttaggggtgtcttggaaggaggggggatggctgttggagcaattaggacaggaaggtataaacgccaggcctaagagcttgggcagggcagaggaagttaggctaaagggcttcagagcttcagagcaggccttgctcatattaaaggggtaatgggactctntttacangtgccagcagtgggaganggctgtgtgacattggtgaccctgnctttatcanagctcaattgggntctgctggtcaaattcttggaggttgac

SEQ ID NO: 215437 - DNA, 600 bp, Canis familiaris
  misc_feature (475)..(475): n is a, c, g, or t
  misc_feature (534)..(534): n is a, c, g, or t
  misc_feature (552)..(552): n is a, c, g, or t
  misc_feature (583)..(583): n is a, c, g, or t
  misc_feature (593)..(593): n is a, c, g, or t
tcccgttggaatcatgatgataatcatagcggcactttttacagcatcagcagtcatctcgctagttatgtttaaaaaggtacacggactataccgcacaacaggtgctagttttgagaaagcccaacaagaatttgcaacaggtgtgatgtccaacaaaactgtccagactgcagctgcaaatgcagcttcaagtgcagcaactagtgcagcccagaatgctttcaagggtaaccagatttagagaaccctccaacaatacactggtatcttctgactgtactttttctccagttactgtattctataaatatttttatgttcaaaacacagtacacatggcatgtatatttcctgttcacttgtgcatggggctaaaaccagaaaaacttccttgtcttattatttaccctagcagtttaatattttggcgccccctgcagaaaaaaaaatcacatgctaaataaatattctncatattttttggggggatgaatgttcagcaaatatttcagtggtgacacactggaattnatatgatacttatggatnaaaatgcatttagtactagctgcagtctttntttcagaatnttaaact

SEQ ID NO: 215438 - DNA, 600 bp, Canis familiaris
  misc_feature (454)..(454): n is a, c, g, or t
  misc_feature (462)..(462): n is a, c, g, or t
  misc_feature (474)..(474): n is a, c, g, or t
  misc_feature (507)..(507): n is a, c, g, or t
  misc_feature (517)..(517): n is a, c, g, or t
  misc_feature (525)..(525): n is a, c, g, or t
  misc_feature (577)..(577): n is a, c, g, or t
ccaagctgacttctgcagctggactgcatccgatcctcacatagaggatctcaagagccaggaactgagtcctgtcggcctctttgagttgttttttgatgaaggaacaattaatttcattgttaatgaaaccaatcgttatgcttggcagaaaaatgtcaacctggggctcacagcccaggaattaaagtgtgttctgggcattttgattttaagtgggtatatatcctatccaaggagaaggatgttttgggaaacctctcctgattcccatcatcatcttgtggctgatgcaatcagaagggacaggttcgaagtgatcttctcctacctgcattttgcagataacaatgagctggatgaaagtgataggtttgccaaagtcaggcctctcatcatccggatgaattgcaatttccagaagcacgcacccttggaagagttctacagcctntggagagnccatgtgtgagnactttgggcacccgggatccaagcctctgcctncaaggcaggnccatgcanctgggctacaagatctggtgtgggacaaccattatgggcttaccctggtgtngtttgagcccctcacagggcacg

SEQ ID NO: 215439 - DNA, 600 bp, Canis familiaris
  misc_feature (585)..(585): n is a, c, g, or t
cagtttgagtggggctgttgttcagtgttcagtaagcaaaactatgtgaaatcttttagcttttaattatttagctaatagtccatagagaaaatatttttctcttaggagattttgaagtcatagcctacctacaaaagggaccactacatttaaaacattaaaaaatgaataactctgggaggaggtgactgctattggatatggggtcttcttttgggtactgaaagtgttctcagatagtggtaagggttccacaactctcaatatactgtaaaccactaaattgtacactttaaatgggtgaattttatgttatatgaattatatctcaataaagctatttaaaaaaacccagtaactgcttgttatatcacattgaatcatggaggaactctttgtttttctagatgctggatccattgtctttaagcagccctgaaaattctggctcaggaagttgtccatcacttgatagtcctttggatgggtaatattgattataggttttattttttagtatatgtgcataaatgcatgtatatatattatgttagaagagtgtaattgatactcattacttanggcaaatgaattttt

SEQ ID NO: 215440 - DNA, 600 bp, Canis familiaris
  misc_feature (462)..(462): n is a, c, g, or t
  misc_feature (476)..(476): n is a, c, g, or t
  misc_feature (521)..(521): n is a, c, g, or t
  misc_feature (553)..(553): n is a, c, g, or t
ggttattcagacatgctgtttaatctccatacatctgtgaatttttcactttttcttgtaattaatttctagtttcataccattatagtttgttattattttaatcttcttaaatgtattaaaatttttttgtgacctaacatgtgatctattctggagaatgttccatgtgcacttgaaaagaatgtgtattctgttacttacttttgtttagaatgttctgtgtatatctattaagtcactctggtctaatgtgtcatttaaggcctgtgtttccttattgatttctttcctggtataagtgggatattaaagttcttttctattactgtattgtcaatgtcttcagttaggtctgttaatatttggtttatatatttaggtactctaacttctgttggatacatatatatttacaaatgttatatcctcttgttggattgacctctttatcatttctgnaatgccttctttgnctctggattacaaccctagttttaaagtctattttgtatgatatnaagtatagctatcccagctttctttaggtttncattcttcatgaaacacctttttccattcccttggctttccgtttgg

SEQ ID NO: 215441 - DNA, 519 bp, Canis familiaris; identical to SEQ ID NO: 5334
  misc_feature (4)..(4): n is a, c, g, or t
  misc_feature (478)..(478): n is a, c, g, or t
  misc_feature (512)..(512): n is a, c, g, or t
  misc_feature (514)..(514): n is a, c, g, or t

SEQ ID NO: 215442 - DNA, 600 bp, Canis familiaris
  misc_feature (426)..(426): n is a, c, g, or t
  misc_feature (431)..(431): n is a, c, g, or t
  misc_feature (464)..(464): n is a, c, g, or t
  misc_feature (467)..(467): n is a, c, g, or t
  misc_feature (485)..(485): n is a, c, g, or t
  misc_feature (516)..(516): n is a, c, g, or t
  misc_feature (530)..(530): n is a, c, g, or t
  misc_feature (579)..(579): n is a, c, g, or t
  misc_feature (593)..(593): n is a, c, g, or t
attttttggtctcataccttgtccagccctccacaaaccatgttttgcagaacttctgccaactttggtatagcttaccctcttcctattccaggaaagattttattattagaggaccctttagaaggcatggtacctgtgatctgttctaagtcacaaagaggtggttgttgaatcagagtctggggcaggtggggaaaagcacacagattccatgtgtgctttggggagcaggatggctttgacctcgggaagaggagagccttcagtttttagccgaagccagccattgtatttttgactaccgtgacctatccccagatacaggtgcagtgctggttgctattcaaattttcttgtgccttgtgaattccataccatgtcctgcacctcatactttgtggtgtcactcctgccactgtgaangcagnttgtcatttatgtggcttggaatctaatatcgntangggtctttttaaagtaanggtgatgagtttcttctcatggatgagcctnacgtaattggaggnggtttcccatgctaaaaaaggttttgggctttttgggttgatggaaagnacattgggactggngaaccca

SEQ ID NO: 215443 - DNA, 600 bp, Canis familiaris
  misc_feature (127)..(127): n is a, c, g, or t
  misc_feature (180)..(180): n is a, c, g, or t
  misc_feature (217)..(217): n is a, c, g, or t
  misc_feature (232)..(232): n is a, c, g, or t
  misc_feature (300)..(300): n is a, c, g, or t
  misc_feature (306)..(307): n is a, c, g, or t
  misc_feature (337)..(337): n is a, c, g, or t
  misc_feature (377)..(377): n is a, c, g, or t
  misc_feature (430)..(430): n is a, c, g, or t
  misc_feature (457)..(457): n is a, c, g, or t
  misc_feature (470)..(470): n is a, c, g, or t
  misc_feature (498)..(498): n is a, c, g, or t
  misc_feature (512)..(512): n is a, c, g, or t
  misc_feature (518)..(518): n is a, c, g, or t
  misc_feature (559)..(559): n is a, c, g, or t
  misc_feature (580)..(580): n is a, c, g, or t
  misc_feature (588)..(588): n is a, c, g, or t
tttttttttttaaagaaaacatctgaaagccttcgaatactgtattaaaccatgagagaaagcagatgtatttttacattttttcttttacataaaaatttaaaaattccaacttttataatattanaattaaaaaccagctggctgagtgcagtcagggtgaaaatacttgtgatgtanacatgagctagattggggtcgggtggatgttgaccanttttgaatggtttangtttaaaattgaactatttttgtttgaaaatgtaaagaatttcctacaagaaaatttcatgaaatcanaaagtnnattattttcaccctattgcagctaaatggncctggggaatggaattttcgacctcactactttggatggnacaccttcatcacttatgttacttttgtgcctccacaatggattgggggattntgctttcactggttagtgaataatcanaaggaaaaaaatnccttattattggtaagttagccatcatnatgcctctcggaangcattnctgtactgggtcctattcaagatttaaatatgctactactngaggaaaaaaccattgcctgncgaattgnaagactgccttt

SEQ ID NO: 215444 - DNA, 600 bp, Canis familiaris
  misc_feature (343)..(343): n is a, c, g, or t
  misc_feature (347)..(347): n is a, c, g, or t
  misc_feature (369)..(369): n is a, c, g, or t
  misc_feature (432)..(432): n is a, c, g, or t
  misc_feature (445)..(445): n is a, c, g, or t
  misc_feature (450)..(450): n is a, c, g, or t
  misc_feature (459)..(459): n is a, c, g, or t
  misc_feature (514)..(514): n is a, c, g, or t
  misc_feature (542)..(542): n is a, c, g, or t
  misc_feature (578)..(578): n is a, c, g, or t
tttagcctcattatgcaataatcacattgcctttgtgttaatggtcaagtacttacccttaaagtggtggatagtttttcagacgaattcaagcagagtcttgggtacaggaaatgtaatttatgaagtaaatcctagttgcttaatcaaactaagggtctcttaacaactaagcaaacctctcatctggcatccttaaaatgagattccctgagaaaccattcaccactactggaactggtatctagctacttagtcttactttggatttatttatgcttcagaatacagctgtttgtcctgtgcatgaacatatgaataattatgtgtggatatgtgaggntttnccaatagaaaaagttaactggnacttctaaatattaacatacttctggggtaaatttggtatagtattaaataaacttaagctgnagctttttaccgngtttngataatggncccaacatctggctgtttacatgggataaaatcaagttttaaacaacagccattntaagaacttgtcctggtgaatggacggnaaaatttaatgcattgtaaaacctggtggggaaggngccaaaaggttgatggggacaa

SEQ ID NO: 215445 - DNA, 319 bp, Canis familiaris; identical to SEQ ID NO: 5338

SEQ ID NO: 215446 - DNA, 392 bp, Canis familiaris; identical to SEQ ID NO: 5339

SEQ ID NO: 215447 - DNA, 515 bp, Canis familiaris; identical to SEQ ID NO: 5340
  misc_feature (359)..(359): n is a, c, g, or t
  misc_feature (381)..(381): n is a, c, g, or t
  misc_feature (395)..(395): n is a, c, g, or t
  misc_feature (403)..(403): n is a, c, g, or t
  misc_feature (456)..(456): n is a, c, g, or t

SEQ ID NO: 215448 - DNA, 289 bp, Canis familiaris; identical to SEQ ID NO: 5341
  misc_feature (12)..(12): n is a, c, g, or t
  misc_feature (44)..(44): n is a, c, g, or t
  misc_feature (46)..(46): n is a, c, g, or t
  misc_feature (48)..(48): n is a, c, g, or t
  misc_feature (255)..(255): n is a, c, g, or t
  misc_feature (260)..(260): n is a, c, g, or t
  misc_feature (267)..(267): n is a, c, g, or t

SEQ ID NO: 215449 - DNA, 389 bp, Canis familiaris; identical to SEQ ID NO: 5342

SEQ ID NO: 215450 - DNA, 389 bp, Canis familiaris; identical to SEQ ID NO: 5343
  misc_feature (25)..(25): n is a, c, g, or t
  misc_feature (347)..(347): n is a, c, g, or t
  misc_feature (376)..(376): n is a, c, g, or t

SEQ ID NO: 215451 - DNA, 504 bp, Canis familiaris; identical to SEQ ID NO: 5344
  misc_feature (385)..(385): n is a, c, g, or t
  misc_feature (432)..(432): n is a, c, g, or t
  misc_feature (453)..(453): n is a, c, g, or t
  misc_feature (471)..(471): n is a, c, g, or t
  misc_feature (478)..(478): n is a, c, g, or t
  misc_feature (483)..(483): n is a, c, g, or t

SEQ ID NO: 215452 - DNA, 801 bp, Canis familiaris; identical to SEQ ID NO: 5345
  misc_feature (15)..(15): n is a, c, g, or t

SEQ ID NO: 215453 - DNA, 600 bp, Canis familiaris
ggccttatatggaaaacaaagaatttaggaatattgaggacaattttatttttctaggaacaaaatgaagagtgggaatgcgaagaatgttacttgtattaagcaaaaaaagcataattagtgagcaaagaactaaattctttaatatttctaaagatattaatctgcttcatggctttttaaatgccagtattcaattttgaaagtaaaattatgctaaaattaatctacttaccacttaatggctgattttgtctttggtttttagttacataaactcttaaaatacagtatttaaagcctaggattttactaatttgcatttgggttgttaatgatgtctattctttgatgtgaatgttaaggtaaagaaggtaaataacggttgaaaacagcatggaaataaattacaaactgaaatgtaattttatgttacgtatgtttatccttcgtaagcattgctattatgtcttaaaattaacaaaaatcgaatacatagaattgtaagcatccccaaataattctttatcttaaatttctttaaaaaatgactcagcatgtaataacttttcattttaaatatcacatcagtggtgctca

SEQ ID NO: 215454 - DNA, 330 bp, Canis familiaris; identical to SEQ ID NO: 5347

SEQ ID NO: 215455 - DNA, 600 bp, Canis familiaris
  misc_feature (480)..(480): n is a, c, g, or t
  misc_feature (494)..(494): n is a, c, g, or t
  misc_feature (503)..(503): n is a, c, g, or t
  misc_feature (517)..(517): n is a, c, g, or t
  misc_feature (525)..(525): n is a, c, g, or t
  misc_feature (537)..(537): n is a, c, g, or t
  misc_feature (551)..(551): n is a, c, g, or t
  misc_feature (564)..(564): n is a, c, g, or t
  misc_feature (598)..(598): n is a, c, g, or t
tgatattgacattgatattgaattgtgggataataagacgataacaagtgggctgaaaaactacctcaggtgccttgcagaaccactgatgacttacaaattacacaaagattttattgttgcagtgaaatccgatgaccaaaactaccgggtggaagctgtacatgcattggtgcacaaattgccagaaaaaaacagagagatgctggacatcttaataaagcacctcgtaaaagtatcactacacagccaacaaaatctcatgactgtctcaaaccttggtgtcatatttggcccaactctaatgagagcacaagaagaaactgtggctgccatgatgaatattaaatttcagaatattgtagttgaaattctgattgagcactatgaaaagatttttcatactgccccagaccccagtgttcctcttcctcagcctcagtctcgattctggattcccgaaggactcgcgcaatctgnctctccacaggttncccggaagnccagagggcaggtntacaccgngctttggcagancctggtagtgactnttacagcagcagnccaaacggcacacccatggggagcattgagtctntg

SEQ ID NO: 215456 - DNA, 600 bp, Canis familiaris
  misc_feature (490)..(490): n is a, c, g, or t
  misc_feature (510)..(510): n is a, c, g, or t
  misc_feature (517)..(517): n is a, c, g, or t
  misc_feature (552)..(552): n is a, c, g, or t
  misc_feature (562)..(562): n is a, c, g, or t
  misc_feature (564)..(564): n is a, c, g, or t
  misc_feature (580)..(580): n is a, c, g, or t
acctcatctcgaggtttgatcggatgggggcaggtggccccctcttcatagatgtgacctggcacccggcaggggaccctggctcagacaaggagacgtcctccatgatgattgccagcaccgccgtgaactactgtggcctggagaccatcctgcacatgacctgctgctgtcagagccgggagcagatcacaggctatctgcacaaggccaagcggctgggcctgaagaacatcttggcgctgaggggagaccccgtgggcgaccagtgggaagaggaggaaggaggcttcagctatgccgcggacttggtgaggcacatccgaagcgagtttggggactactttgacatctgtgtggcagggctaccactcccttcggcagctcgtgaaactgtccaagctggaggtaccgcagcagatcaaagatgtgattgagccaatcaaagacatgatgctgcgatccgtaactatggcatcgagcaggctgngagcctgtgccaggagcttntgacagnggcttggtgccaggccttcacttttacaccttaancgggaaaggncncacaaagtgctgaacnctggcatgtgatcgagaccc

SEQ ID NO: 215457 - DNA, 600 bp, Canis familiaris
  misc_feature (310)..(310): n is a, c, g, or t
  misc_feature (357)..(357): n is a, c, g, or t
  misc_feature (412)..(412): n is a, c, g, or t
  misc_feature (441)..(441): n is a, c, g, or t
  misc_feature (477)..(477): n is a, c, g, or t
  misc_feature (554)..(554): n is a, c, g, or t
  misc_feature (565)..(565): n is a, c, g, or t
  misc_feature (579)..(579): n is a, c, g, or t
  misc_feature (594)..(594): n is a, c, g, or t
agctcagacactctacagctgagagtagacacttgtggtatgtggagtacagataagccaggggcaggccacggcacgctccatgaaagctaggagggagtgaagtttcagtgaccatcgcaagaaaggaggcagacaagagtaaggcacacctgactcttaggactagcagtcagaaccaggagaaaaggttttattgctatgctggtaggtaagaacagattttacttacatccatatagtgttacttaaattccagttttctgttacattttccttaatatattgagccaaaactagtccagttaanctgaactggcttttctggagatcagttgttttaaatggacaccctanacttggctcccaaatgaaggaagtgaacacttaattctactgtgacaatatattnttgcccttttaattttatttcctaccttnctttaacccatttcattaaaacaatggcttaaaagnaatgcattataatctttccccaaacatggtgggagggaaggtggaccattaattttgggggtgggggattaccctgntctggaatggnctaaaaaactattntaaggtgttactttntaggaa

SEQ ID NO: 215458 - DNA, 471 bp, Canis familiaris; identical to SEQ ID NO: 5351
  misc_feature (3)..(4): n is a, c, g, or t
  misc_feature (28)..(28): n is a, c, g, or t
  misc_feature (51)..(51): n is a, c, g, or t
  misc_feature (59)..(59): n is a, c, g, or t
  misc_feature (188)..(188): n is a, c, g, or t
  misc_feature (191)..(191): n is a, c, g, or t
  misc_feature (221)..(221): n is a, c, g, or t
  misc_feature (240)..(240): n is a, c, g, or t
  misc_feature (249)..(249): n is a, c, g, or t
  misc_feature (275)..(275): n is a, c, g, or t
  misc_feature (347)..(347): n is a, c, g, or t
  misc_feature (355)..(355): n is a, c, g, or t
  misc_feature (357)..(357): n is a, c, g, or t
  misc_feature (373)..(373): n is a, c, g, or t
  misc_feature (395)..(395): n is a, c, g, or t
  misc_feature (402)..(402): n is a, c, g, or t
  misc_feature (415)..(415): n is a, c, g, or t
  misc_feature (446)..(446): n is a, c, g, or t
  misc_feature (453)..(453): n is a, c, g, or t
  misc_feature (457)..(457): n is a, c, g, or t

SEQ ID NO: 215459 - DNA, 600 bp, Canis familiaris
  misc_feature (450)..(450): n is a, c, g, or t
  misc_feature (455)..(455): n is a, c, g, or t
  misc_feature (465)..(465): n is a, c, g, or t
  misc_feature (486)..(486): n is a, c, g, or t
  misc_feature (495)..(495): n is a, c, g, or t
  misc_feature (529)..(529): n is a, c, g, or t
  misc_feature (533)..(533): n is a, c, g, or t
  misc_feature (550)..(550): n is a, c, g, or t
  misc_feature (573)..(573): n is a, c, g, or t
  misc_feature (576)..(576): n is a, c, g, or t
  misc_feature (591)..(591): n is a, c, g, or t
acgccccagccaggagccagccggtggcccacctgccagcatgggccctgggcgcggctagttaaatcttgagctctgtttgaccaagcagccaaggtttcggtctaagtaccacccagatgaggtggggaagcgtcggcaggaggcccggggggccctgcaaaaccgactgagggtattcctgtcccttatggagagtggctggtttgataatcttctcctggacatagacaaagctgatgccatcgtcaagatgctggatgcagctgtgattaagatggaaggagggacagagaatgatctgcgcatcctggagcaggaggaggaggaggagcaggcaggaaagcctggagagcccagtaagaaagaggaaggccgggctggaccaggcctgggggatggagagcgcaaggccaatgataaggatgacaagaaagaagacggcaacangctgnaaatgacagntctaatgatgacaaaactaanaaatctganggtgatggggacaaggaaaaaaaaaagatgactntganaagatgcccaaaaactngcagaagcggacaggagcccagnggngatgaagctttgatnaagcagcgg

SEQ ID NO: 215460 - DNA, 457 bp, Canis familiaris; identical to SEQ ID NO: 5353
  misc_feature (14)..(14): n is a, c, g, or t

SEQ ID NO: 215461 - DNA, 837 bp, Canis familiaris; identical to SEQ ID NO: 5354
  misc_feature (645)..(645): n is a, c, g, or t
  misc_feature (702)..(702): n is a, c, g, or t
  misc_feature (729)..(729): n is a, c, g, or t
  misc_feature (734)..(734): n is a, c, g, or t
  misc_feature (738)..(738): n is a, c, g, or t
  misc_feature (764)..(764): n is a, c, g, or t
  misc_feature (804)..(804): n is a, c, g, or t
  misc_feature (806)..(806): n is a, c, g, or t

SEQ ID NO: 215462 - DNA, 688 bp, Canis familiaris; identical to SEQ ID NO: 5355
  misc_feature (30)..(30): n is a, c, g, or t

SEQ ID NO: 215463 - DNA, 600 bp, Canis familiaris
  misc_feature (365)..(365): n is a, c, g, or t
  misc_feature (399)..(399): n is a, c, g, or t
  misc_feature (428)..(428): n is a, c, g, or t
  misc_feature (441)..(441): n is a, c, g, or t
  misc_feature (491)..(491): n is a, c, g, or t
  misc_feature (528)..(528): n is a, c, g, or t
  misc_feature (563)..(563): n is a, c, g, or t
  misc_feature (594)..(594): n is a, c, g, or t
  misc_feature (597)..(597): n is a, c, g, or t
gagtctgtccccttcctccttggttacatcttgacagaaaccagacactgcaaaacccacaggctgagtcatatttacctcctttccccacatgtcactgcccttgcaactttgcatcctgaatcccccagtgtggggtgaacttgaagagcaagaggaaaacaagtgccagcaaaatcctgtcacccaaggatttaaataaaacctcaccttcctcctgactggcatatgcagcgggcttatttctctcatcctgttcttcagctggattgggaggatttggttttcacttacccccttattgttcagaatacgagctttagctggaggttgctgactaattttacggttgtgtaggtaactgntagcacttcggtcagtcctgcattctttttgaangaagtctctgtgttccaagtctagtaggntaaattggttttnccttcaagagaaaaggctagcaaaggccagctgattaacttgactttggngcttacatgttctgggttcattctttgaatcactggngaccaaatctggtagtgtccaaccagtctttttanaatggaaaggactctcgaaggatgcttgggncantgg

SEQ ID NO: 215464 - DNA, 860 bp, Canis familiaris; identical to SEQ ID NO: 5357
  misc_feature (710)..(710): n is a, c, g, or t
  misc_feature (742)..(742): n is a, c, g, or t
  misc_feature (754)..(754): n is a, c, g, or t
  misc_feature (841)..(841): n is a, c, g, or t
  misc_feature (843)..(843): n is a, c, g, or t

SEQ ID NO: 215465 - DNA, 503 bp, Canis familiaris; identical to SEQ ID NO: 5358

SEQ ID NO: 215466 - DNA, 600 bp, Canis familiaris
  misc_feature (405)..(405): n is a, c, g, or t
  misc_feature (542)..(542): n is a, c, g, or t
  misc_feature (563)..(563): n is a, c, g, or t
agtaagcacctcaggacgcacactttctaaagatcttttaccgaagattagtctctctagtttcaaaagttgagagatggtacttttcggacgctttcctgagagccgtcttgttcaagcgtctaccaatttcgtcacgtttgacggattcgcggtgaaaacaatcactgctacgatttctgttcttttctacctaagacacgtctttaatatcctcgtgtgcgtggctgcggcgtgtatcggcctgacgcaaagcgcagacccgttagcaccgcgcaattcacgggttcggacccccacgcgtcgggtcgcgcccgccgcccgcccgcccgcccgcccgtgggtccgccgctgccgaggcgctcggccctccccgggagccggtctcgggggcagtaggctctnccggaagccggtgctgctccaagggagaatcggggcatttgcaggatttgtaggcgggggttacagaccgcctcgctgagggtcactcatcgggtattctgacctctcggggcctttactgtcgctacagacaaggngccggagcttagccgaccctncttccgcgaaggaagccggccgcagtccacgggctcc

SEQ ID NO: 215467 - DNA, 600 bp, Canis familiaris
  misc_feature (504)..(504): n is a, c, g, or t
  misc_feature (524)..(524): n is a, c, g, or t
  misc_feature (540)..(540): n is a, c, g, or t
  misc_feature (549)..(549): n is a, c, g, or t
  misc_feature (584)..(584): n is a, c, g, or t
  misc_feature (598)..(598): n is a, c, g, or t
atgtgtaaagatacagactcttatatagagacccacagaagctggcagctgctgagcctttgcagcctttaagatttagaagttagagaaacaagaagctgttgattgactatcaaaatgatcaaaagatgtaaattaagtgccattttaaaatgtatttatcatactgttactatctacagctgtattccttattaacttattaaaagtcgtgttgagaaacatcaaactcctaaacctttagtagcgactacgaggctagtggtcacaagcactctaaaagacattctgtccctattttggagaagaaaatatttgcatgtttaactcctaatttaggctttgagtatactgtaaaaagtgctgtgtgatatattatcaataaagtactcaaaaatggcactttaattttttaaaaaccataaattatgcactgttttaaacttcagtattgaatattgactggtgtgtggaatccaattctgtaattaaaaaataatttgngactagaatagaactttttncctggttttagtaaanagtcttgcntgttgagactttaaaaaattaaattaaaaaaaagngcttttgggtactnaa

SEQ ID NO: 215468 - DNA, 600 bp, Canis familiaris
  misc_feature (554)..(554): n is a, c, g, or t
  misc_feature (579)..(579): n is a, c, g, or t
  misc_feature (591)..(591): n is a, c, g, or t
gggggcagatgctataatctgtagcaatcttttggtcctgatttgttaaaatctatcttcctttctttttattccccttccctctgcccccaccatttctctctccttccttcttttcttctcttcctttcttcccccttgaagtatatcacggttaaaaatgagactgtcttttcatatactttcaaatctcactaatgtttgtttaaataagttttctctttgtatctcaatatcttctctttctaactttaagcctttctatctttgttttcatgtcatgtatggtgatagttttcatgccccctttttggatgactttagtgttcatgaacagtccattcaataccctatacttaatttcagacgcttattcacatgaccaaaccctgttctttattagcatcagaagtgtctcacatctgaaatcataacttctttttcaagactctaactgtaggggatccctgggtggcgcagtggtttggcacctgcctttggcccagggtgcgatcctggagtcccaggatcaaatcccatgtcgggctcccggngcatggagcctgcttctccctctgnctggggctctgnctctctctc

SEQ ID NO: 215469 - DNA, 600 bp, Canis familiaris
  misc_feature (411)..(411): n is a, c, g, or t
  misc_feature (523)..(523): n is a, c, g, or t
  misc_feature (530)..(530): n is a, c, g, or t
  misc_feature (549)..(549): n is a, c, g, or t
  misc_feature (552)..(552): n is a, c, g, or t
  misc_feature (579)..(579): n is a, c, g, or t
acattctgcaagccctgatactcacgcctgcaggtgccaaacagaaggaggcagaaacagaatgaccactgtgagtggagcagcccttggaggagaacttgaacagattcggggtcacgctttgcctcatgaacacggaccgtgacagagacagtaaaatggctaagaatgtatatcagggtttagtgatgggtattttttccagtgatattgaaactgagcataagaaacagagtttatgtgtttgaagattcaggcttgcgttaaagactgttttcagacgtttgtctgaacgatttcaaatgctgtatgttattaaagtgcactgtgtcctgaaattcttattacttttcattttcaaagaattcactggtctgtaacaggtaatatgacataaggcgagtgcatggnctattcagacctagtgccttatgtcagaacacgcgatatgtcaccattgcggcccgtggcagctggagccacacggtgctgggggcgtgagcgttctttgggacctttaccnaatcagnttgtttcctttagatttgncgnacagttgggatttgggatttaataatnaccttataaaacttaacgacg

SEQ ID NO: 215470 - DNA, 745 bp, Canis familiaris; identical to SEQ ID NO: 5363
  misc_feature (699)..(699): n is a, c, g, or t
  misc_feature (716)..(716): n is a, c, g, or t
  misc_feature (733)..(733): n is a, c, g, or t

SEQ ID NO: 215471 - DNA, 600 bp, Canis familiaris
  misc_feature (433)..(433): n is a, c, g, or t
  misc_feature (504)..(504): n is a, c, g, or t
  misc_feature (507)..(507): n is a, c, g, or t
  misc_feature (510)..(510): n is a, c, g, or t
  misc_feature (541)..(541): n is a, c, g, or t
  misc_feature (543)..(543): n is a, c, g, or t
  misc_feature (576)..(576): n is a, c, g, or t
  misc_feature (584)..(584): n is a, c, g, or t
gcagtccgtgaggaagctccgtgaggcggctccgcgaggaagctccgtgacgaggctccgtgaggcggctccgtgacgaggctccgtgaggcggctccgtgaggaagccgaggcgtcacaggtgatggcggagcccggggtgacggcggggccggcggcggagcctgggctcccggaggagcggggagcccccgccgcccccgcccccgcggacagcggccccccagccccggtgggaggcggcgggcgtcgcggttccgtagcgaccggagcggggcgggcggaggccccgccccctagcgaaggcctggcagcggcgccggtgtcggtgtcggtggcaacggacggcggcctggaaaatgggtgtgggagcgccggggcgcgcgggccgggtgcggggggccctgcgggggcgtcggacgtgcgggcggangagacggccccggagctgccggcccgcgacggcctcgcttcgcggcggcggcggcggcggcggcggcggangancanaagatggagacagacccgcaggaaggggaananctggccggccgggaaggtgccgggcggccgctntaaagatncaacttacgtaccctg

SEQ ID NO: 215472 - DNA, 600 bp, Canis familiaris
  misc_feature (451)..(451): n is a, c, g, or t
  misc_feature (462)..(462): n is a, c, g, or t
  misc_feature (483)..(483): n is a, c, g, or t
  misc_feature (503)..(503): n is a, c, g, or t
  misc_feature (518)..(518): n is a, c, g, or t
  misc_feature (545)..(545): n is a, c, g, or t
  misc_feature (547)..(547): n is a, c, g, or t
  misc_feature (573)..(573): n is a, c, g, or t
  misc_feature (579)..(579): n is a, c, g, or t
  misc_feature (597)..(597): n is a, c, g, or t
taagccaggttttcttacttcagagtttagaaacatacagactttgatatgtgtgtgtgtatatatatataccactgagccacccgggctgccctgaagacatctttatgtcaaagctgcctaattcagttttacgtctgggtgttttgcagatagataggatctgcttcagaggaaactataccagctcctgagagccaccagctcctgagagcctttcctggcatgtccagcgcccaggtggtgccccttccaggctcttaccctggcacagcactcatcacattgtggtataattgcccaggtccccacagaaacagacaattcactgggaaagaaattaaaatggacttgaaacatttgaaaagatgaaactcaaagaatgccagctgataaaggcataccaaaggacagaattagaaaatcatttgacagcacctgataacttggntcacccaaggnccatcagtgaatgagaaaccngatacccctaagggtctggngggaagaggaaaaangggcatttacatggggagggggggccncncttaacctggcttattagtagggggnctcaanaattggggatttttgggngca

SEQ ID NO: 215473 - DNA, 600 bp, Canis familiaris
  misc_feature (455)..(455): n is a, c, g, or t
  misc_feature (468)..(468): n is a, c, g, or t
  misc_feature (497)..(497): n is a, c, g, or t
  misc_feature (530)..(530): n is a, c, g, or t
  misc_feature (535)..(535): n is a, c, g, or t
  misc_feature (539)..(539): n is a, c, g, or t
  misc_feature (585)..(585): n is a, c, g, or t
  misc_feature (597)..(597): n is a, c, g, or t
ggactcagaggagaggcggctgggtcatccggaggaagccggctgcgcccaagcgtcggactggggaccttgctgctgacccggagggaggaccggagcagggtccatgcgccttccccgctggcccgccctgtaccacggctgttctggaacccgggtgcaaggccagacgacagcactaaccagacctctagccactcacagctctttttaaacagcttcaaaatatgcagcaaaaatccacacaataacacgagtggcaccatttgtctcaaactaggccagctgggttccagcttttcttctactagtctgatgttttataaatcaaaacctggttttttcttctccgacatccttttttttggccaaatctcgtggtgtttcgcagaaatacggaaaatttcaaatgcagttgagtattcttttttaaatgcagattttcaaacctatgnttttttttcaggnggtccttttttgggtctggcttgctgagngtaaaagttggtatctgaatgagtctgtccctntgctnccgngcgacattggggcggacggccgcctacggagcgtccggggcccggntttcataactgngca

SEQ ID NO: 215474 - DNA, 263 bp, Canis familiaris; identical to SEQ ID NO: 5367
  misc_feature (2)..(2): n is a, c, g, or t
  misc_feature (33)..(33): n is a, c, g, or t
  misc_feature (38)..(38): n is a, c, g, or t
  misc_feature (41)..(41): n is a, c, g, or t
  misc_feature (53)..(53): n is a, c, g, or t

SEQ ID NO: 215475 - DNA, 404 bp, Canis familiaris; identical to SEQ ID NO: 5368
  misc_feature (2)..(2): n is a, c, g, or t
  misc_feature (51)..(51): n is a, c, g, or t

SEQ ID NO: 215476 - DNA, 203 bp, Canis familiaris; identical to SEQ ID NO: 5369
  misc_feature (2)..(2): n is a, c, g, or t
  misc_feature (44)..(44): n is a, c, g, or t
  misc_feature (104)..(104): n is a, c, g, or t
  misc_feature (113)..(113): n is a, c, g, or t
  misc_feature (151)..(151): n is a, c, g, or t

SEQ ID NO: 215477 - DNA, 600 bp, Canis familiaris
  misc_feature (519)..(519): n is a, c, g, or t
  misc_feature (529)..(529): n is a, c, g, or t
tcctttttaaagcacaagaggcccatatgtcttcagttattttccttggtttaatatatatatttttttgataacaagctttcagaagcaagagaataaaaatcatgcattgttgaacccttaactggctggcatgctttcctgtttgtaccctttatattttattggataaaaccaaggacagtccagataaaatcctaaatcacttactgcagtagaagtgtagcacagttgcttagtacaagcttctcacttcccagagacctgaattcaaatttgaatagcctgagttcttgctcacttaaaatccaaaagaacacactgttatccatgtgtatgcttgaacctaaatcatgttggtatgagttaacagtttggtttggaagaccttggttgggaagagtttcagataaggtcatatatataaaaagcaatgtctactgttttgcgccagctagtgcttacaatttcattcgagccctaagttatgtgctccgctgttattctttctttggcagntgaacgttgnaattcgaaattttttggtttcagaagtactaagcaaacaggcataaaaggggaaggggcgtgctagtgttg

SEQ ID NO: 215478 - DNA, 479 bp, Canis familiaris; identical to SEQ ID NO: 5371

SEQ ID NO: 215479 - DNA, 378 bp, Canis familiaris; identical to SEQ ID NO: 5372
  misc_feature (2)..(2): n is a, c, g, or t
  misc_feature (37)..(37): n is a, c, g, or t

SEQ ID NO: 215480 - DNA, 320 bp, Canis familiaris; identical to SEQ ID NO: 5373
  misc_feature (2)..(2): n is a, c, g, or t
  misc_feature (31)..(31): n is a, c, g, or t
  misc_feature (33)..(33): n is a, c, g, or t

SEQ ID NO: 215481 - DNA, 338 bp, Canis familiaris; identical to SEQ ID NO: 5374
  misc_feature (2)..(2): n is a, c, g, or t
  misc_feature (32)..(32): n is a, c, g, or t

SEQ ID NO: 215482 - DNA, 600 bp, Canis familiaris
  misc_feature (472)..(472): n is a, c, g, or t
  misc_feature (478)..(478): n is a, c, g, or t
  misc_feature (516)..(516): n is a, c, g, or t
  misc_feature (522)..(522): n is a, c, g, or t
  misc_feature (524)..(524): n is a, c, g, or t
  misc_feature (577)..(577): n is a, c, g, or t
  misc_feature (581)..(581): n is a, c, g, or t
  misc_feature (595)..(595): n is a, c, g, or t
agtctctcaacctcttcagccctgggcaaccattaatctactttttgtcttcctatattggctattctggacattttctgtaatgaaattataccatatgtgttcctttgtgactggttgctttcaggtagatcatgttgtcagtgttgacacatgatgtagcatgtgtaagtccttcatttattattgccagataaatttccattgtgtggatataccatgttttatttgttcatccatcaattggtagacatttgggttatttccactttctgcataatgtgaaaatgaacatttgtgtacaagtttttgtgtgcacatgtgttttcatttttcttgggtgtatacattagagtggaattgctggattatatgataactatgtatatagaatccaacaatgttggaaccacccaactgtttctaaagtagctgtgtccttttacaatatcaccagcagcatatggggggntttagntcttccttgactatcttttttattttaaacattatagngggtgngnagggggtatctcattgggggtttggattggggttccctggagactagggacgntggncattttttataagnttggg

SEQ ID NO: 215483 - DNA, 293 bp, Canis familiaris; identical to SEQ ID NO: 5376
  misc_feature (117)..(117): n is a, c, g, or t
  misc_feature (146)..(146): n is a, c, g, or t
  misc_feature (193)..(193): n is a, c, g, or t
  misc_feature (220)..(220): n is a, c, g, or t
  misc_feature (256)..(256): n is a, c, g, or t
  misc_feature (270)..(270): n is a, c, g, or t
  misc_feature (287)..(287): n is a, c, g, or t

SEQ ID NO: 215484 - DNA, 495 bp, Canis familiaris; identical to SEQ ID NO: 5377
  misc_feature (2)..(2): n is a, c, g, or t
  misc_feature (30)..(30): n is a, c, g, or t

SEQ ID NO: 215485 - DNA, 585 bp, Canis familiaris; identical to SEQ ID NO: 5378
  misc_feature (2)..(2): n is a, c, g, or t
  misc_feature (34)..(34): n is a, c, g, or t

SEQ ID NO: 215486 - DNA, 255 bp, Canis familiaris; identical to SEQ ID NO: 5379
  misc_feature (2)..(2): n is a, c, g, or t
  misc_feature (30)..(30): n is a, c, g, or t
  misc_feature (32)..(32): n is a, c, g, or t

SEQ ID NO: 215487 - DNA, 346 bp, Canis familiaris; identical to SEQ ID NO: 5380
  misc_feature (2)..(2): n is a, c, g, or t

SEQ ID NO: 215488 - DNA, 407 bp, Canis familiaris; identical to SEQ ID NO: 5381
  misc_feature (2)..(2): n is a, c, g, or t

SEQ ID NO: 215489 - DNA, 502 bp, Canis familiaris; identical to SEQ ID NO: 5382
  misc_feature (2)..(2): n is a, c, g, or t
  misc_feature (30)..(30): n is a, c, g, or t

SEQ ID NO: 215490 - DNA, 277 bp, Canis familiaris; identical to SEQ ID NO: 5383
  misc_feature (127)..(127): n is a, c, g, or t
  misc_feature (186)..(186): n is a, c, g, or t
  misc_feature (243)..(243): n is a, c, g, or t
  misc_feature (267)..(267): n is a, c, g, or t
  misc_feature (271)..(271): n is a, c, g, or t

SEQ ID NO: 215491 - DNA, 600 bp, Canis familiaris
ctcggcagcgactccgaaggtgttaactgtcttgcttatgatgaagccatcatggctcagcaggaccgaattcagcaagagattgctgtgcagaaccctctggtctcagagcggctggagctttcggtcctgtacaaggagtatgctgaggatgacaacatctatcaacagaagatcaaggacctccacaaaaagtactcctacatccgcaagaccaggcctgatggaaactgtttctaccgagctttcggattctcccacttggaggcgctgctggatgacagcaaggaattgcagcggtttaaggctgtgtctgccaagagcaaagaggacctggtgtcccagggcttcactgaattcacaatcgaggatttccacaacacgttcatggacctgatcgagcaggtggagaagcagacctctgtagctgacctgctggcctccttcaacgaccagagtacctcggactacctggtggtgtacctgcggctgctcacctccggctacctgcagcgcgagagcaagttcttcgagcacttcatcgagggcgggcggacagtcaaggagttctgccagcaggaggtggagcccatgtgcaag

SEQ ID NO: 215492 - DNA, 262 bp, Canis familiaris; identical to SEQ ID NO: 5385
  misc_feature (2)..(2): n is a, c, g, or t
  misc_feature (34)..(34): n is a, c, g, or t
  misc_feature (93)..(93): n is a, c, g, or t

SEQ ID NO: 215493 - DNA, 509 bp, Canis familiaris; identical to SEQ ID NO: 5386
  misc_feature (2)..(2): n is a, c, g, or t
  misc_feature (58)..(58): n is a, c, g, or t

SEQ ID NO: 215494 - DNA, 600 bp, Canis familiaris
  misc_feature (464)..(464): n is a, c, g, or t
  misc_feature (513)..(513): n is a, c, g, or t
  misc_feature (535)..(535): n is a, c, g, or t
  misc_feature (590)..(590): n is a, c, g, or t
  misc_feature (597)..(597): n is a, c, g, or t
tgcctttgtgtttcatgacaatgttgcatgttgttttctttttaattatataaaattcatctttgaatgactatatgaatgacactatagcaaattctgtaataaaatttgttttattagttcctcatatctttaaatattgttaatactctgttactaagttacttcctccaactgtgtctatagggcagagaacaggccacctcttctacatgataattatgatcaaaccagtcaatacgatagttgtcagcagacagcaaggataacatttttgttgttgacttaaacagtcaaattagtcaaaatagtaaaactgggttatatggacagagagctacagcattcaaaaattacttttcaaaggtttcttcttttcttaaaatgaactttctcaagtgaaatacatcctcttctagcaaccatctttatctttttgtggatgggttaatcccaaatacttnctgtaattgagggacagtatgaggtgactagaaaatatctcatcagatntgtcgagcagaggctgtaactnccacttaccacgagaaactttaaataagggtgaacagcaggagggttggagggtntagttcntag

SEQ ID NO: 215495 - DNA, 600 bp, Canis familiaris
  misc_feature (562)..(562): n is a, c, g, or t
  misc_feature (588)..(588): n is a, c, g, or t
gcaaaactgtccccggaagcgtcggctgcacgaagcaatacacactggagccgtgtgacttgtctgggagcaattaattaggggtgagaaaaacagaggacttcagcctcctttccagggtgtgtgtgacaggccctgcgacaggccctgcttcggtaagactgccgatggaaggttcccaggagcataacgcctcgcggccgggaagggcagccagttgggggctgacggcagcgagcgccctgggaaaggggccgccgtgcacgcgaggccggccgcctcccgtttccctgcggagctggcttgtgggtaacggggccaggaatgtggccagggcctgaggcttggggctctgcactgaaaatgggaacgatcacagataccagtggaggcaagtgctcacggcagctgtgtgccctgcgcggggcacggcctccgggaggtggcggggcgagcccacgtgggtctctggagcccctttttgcttttttttccgtgtcaccctgttggggagttcctgcagatcggggactgtgctgcgccgaaggggacccaaggtctnaagcctgcaagtcccccagccgcagnccagagcttggg

SEQ ID NO: 215496 - DNA, 600 bp, Canis familiaris
cgggccacactgcaggctgccctctgcctggagaatttctcctcccaggtcgtggaacgacacaacaagccagaagtggaagtcaggagtagcaaagagctcctgttacaacctgtgaccatcagcaggaatgagaaggaaaaagttttgattgagggctccatcaactctgtccgggtcagcattgctgtgaaacaggctgatgagatcgagaagattttatgccacaagttcatgcgcttcatgatgatgcgagcagagaacttctttatccttcgaaggaaaccagtggagggatatgacatcagttttctgatcaccaacttccacacagagcagatgtacaaacacaagttggtggactttgtaatccactttatggaggagattgacaaggaaatcagtgagatgaagttgtcggtcaatgctcgtgcccgcatcgtggctgaggagttcctcaagaatttttaaatcatctggctggacctcaaggccttcccctccagactcccctgtgtctctgcaaagacatcctggagttattccccagagtggcagcaacgatgacagcagcagcagaggcggggagctgggttgggg

SEQ ID NO: 215497 - DNA, 600 bp, Canis familiaris
  misc_feature (546)..(546): n is a, c, g, or t
  misc_feature (548)..(548): n is a, c, g, or t
  misc_feature (574)..(574): n is a, c, g, or t
ttttggctgaaagttgtgaaaggcattttccccttattcttgaagcaccacttacatctgtaccgatcaacgaagaaagagttttgctttgatttaggcagtaatggataccagatgaacatcagtttggcctgttatgctgcagaagggcaaacaacgtttttctacttagtgatccgatcttgatttttctgaatttctcttaccttgtcacccactccacatgcttccaaagttgagttagcgaagcaggagtttataatttttttttttcttcatgcaaccgttgagttgtttgccaagaaagtctttctgggattttgagatggcatggaaatgcccacaaagttcattccttttagagctccttttagcttctgctctaaagctctctcctacactttaaggcataccttgcctgactagtgaatttgccattactagcacagtggaatagcaaaaggaggctatattatggtgtgtctagttaaggaagtttgatgcagtaattatgctaatgatatggccagctgatgctaagtctananacctgtccctggtagcaacttttctnttgaatacccctttggattcattggt

SEQ ID NO: 215498 - DNA, 600 bp, Canis familiaris
  misc_feature (438)..(438): n is a, c, g, or t
  misc_feature (474)..(474): n is a, c, g, or t
  misc_feature (519)..(519): n is a, c, g, or t
  misc_feature (587)..(587): n is a, c, g, or t
gcctggggggagagttcctgaactctggaatgtgccagagtgtgattaacctttgtaattggtgatttttatttggatttaggtctactcacatttttctccccctatacccatcttgagcccatctgtagaaatggtagatcttgtgaaacatcatgaattcatggtggtaagggaattaggccaccttcacatacaacttctttcctctttcttacctaaattgtgatacctgttgatacctattaaacgttctactaataagctattttgaaattcagtgttaaagcagtctccttctttgaagggacaggtattttgcaaacaaaggaattagtgggcattagttttgaatggacacggtaaatgcctgagccagggtctagttcagtgttcttttatttgtgtagtaaacatggattgtatcttagtatcttncagtaagggtgttccttatcttaaagatctcactgnttagcaggggagataggttcatagattgatgcttataatatatgntagtgaactgggtgttatgagtaggcctggaagtaggaagctttccagaaaggaggtagtcttggagntagggggggtaag

SEQ ID NO: 215499 - DNA, 600 bp, Canis familiaris
  misc_feature (481)..(481): n is a, c, g, or t
  misc_feature (534)..(534): n is a, c, g, or t
  misc_feature (567)..(567): n is a, c, g, or t
gcttctcagtacgctctgtgaaggctgtgcagcacggcaagcccatattcatctgccaggcctccttccagcagactcagcccagccctgcgcagcaccagttttccatgcccaatgtgcccccgcctgaacagctgcttgaccatgaggccctcatcgaccagtatttaagggaccccaacctccaagagaagtaccgagtaggactgaaccgaattgctgccaaggaggtgcccattgagatcaagccagtaaacccgcctaccctgagccagctgcagagcatggagcctaagcagatgttctgggtgcgagcccggggctacattggggagggcgacatgaagatgcactgctgcgtggctgcctacatctcggactacgccttcctgggcacagcgctgctgcctcaccagtggcagtacaagggtgcacttcatggtctctttggaccactccatgtggttccacacttcccttncgagctgaccactggatgctctatgagtgtgagagcccctgggctggtggctnccggggctggtccaaggcggctgtggcgtcggnaggcgtcctggctgggtcctgtgcccagaagga

SEQ ID NO: 215500 - DNA, 600 bp, Canis familiaris
  misc_feature (462)..(462): n is a, c, g, or t
  misc_feature (493)..(493): n is a, c, g, or t
  misc_feature (579)..(579): n is a, c, g, or t
  misc_feature (581)..(581): n is a, c, g, or t
gggacggcatcatgtctacagatgtccagattcatcaaattgtgcacatgtgcggctctttgtatagcagtcgtgcctcaataaaggtactaagaaaagagtgactaggtgccccccccacctcggcttcaagggccctggctgccctccacagcctcccttagtgatgggagtctctctcctactggccctgaaaagcccacattgtctcttatgggttgtagcattgaaggcagctcttgaaggcacattgtatttggaagacagaagcagacatagaatagtaataagaaatgtcaataagagaagttagcactcatttcctcaccaagtcattcctgcatgtctactgtgagccagcgattgggctgcttcttactgcacttcacctcaatccttcccatgcgtgtgcatgcacgtgtgctcgtgtgtgtggggggccgatgggtattgccattcttnccatgttacaggtgaggaaagagaagctcanagacagacttgatcaagactgtaatgggatggcgggcaagggggcggtgctctagaagcaggaaaggaggagagtgggctgtcaananactttgagttccggcaagc

SEQ ID NO: 215501 - DNA, 600 bp, Canis familiaris
  misc_feature (581)..(581): n is a, c, g, or t
  misc_feature (597)..(597): n is a, c, g, or t
gttcactcttaattttaacttttttaatttagcaagtcattatgccatttaattttgtatgtaaaggagctcaatttttttgtccaatcaattttcaaatttattatatgtgatttaataatgaaactttttttaaaattttagccatctgacaggtgtatggtgatatctcattgtggttttgatttgcatttccctgatgattagtgatgttgtgtatcttatgtgtctgttggccatctatatatcttttttttggaaaatgtctatttaggtctgcccatttttaatcagattgctgtgttctttagaaggaattgtatttatttgagagagagagaaagcagcaggagcagagggaagaggcagagggagagggaggagggctacccattgaccaattctgggtttgatgccaggaccctaagattatgacctgagctgaaggcagataattaaccaaccgactgagccacccaggcaccccttagtcagatattttttgggggtgaggtggataaatcctttatatattttggatattagccccttatcagatatatcatttgcgaaaacctctnccattcagtagggtgnaat

SEQ ID NO: 215502 - DNA, 600 bp, Canis familiaris
  misc_feature (382)..(382): n is a, c, g, or t
  misc_feature (527)..(527): n is a, c, g, or t
  misc_feature (558)..(558): n is a, c, g, or t
  misc_feature (561)..(561): n is a, c, g, or t
  misc_feature (590)..(590): n is a, c, g, or t
  misc_feature (594)..(594): n is a, c, g, or t
aactgggcaagataatttttaagacccatttcaggaccatcgttccgattctgtcacacactggttgtcctgagctttggttgcttctaatactgaaaaaggaagttgccatcccactctaggaaacatcctgttttattaagaccaagagtactaacgtgttatttgtagaagttgtgaagtagggcaaaggcatttaaagtagtcctgatgatagatcttcatataagttgcaagggatccctgaaaaatatattttaaagataagattcactacagtgtggcttgatagctttataacgtcagtggacaaccctaaaatgattaactgtcatatgattcgcccatatcttgtcttcaaacatgcaaatagatgggttanggggggtacctacatttttttttgatttacacagtacacatcacaaaaaacttagctaagtattcctagatatgtctatatccttagagtaataactatatttccagggtatgtagaatctggtttaccggcccttactcataanatcctccagcccttcctcgttttccattttnttntggaaaatgggaaatggaagggttatttncttntttgat

SEQ ID NO: 215503 - DNA, 703 bp, Canis familiaris; identical to SEQ ID NO: 5396

SEQ ID NO: 215504 - DNA, 600 bp, Canis familiaris
  misc_feature (349)..(349): n is a, c, g, or t
  misc_feature (359)..(359): n is a, c, g, or t
  misc_feature (470)..(470): n is a, c, g, or t
  misc_feature (479)..(479): n is a, c, g, or t
  misc_feature (563)..(563): n is a, c, g, or t
  misc_feature (568)..(568): n is a, c, g, or t
gacgtggactcggggaacagctatgacatctacatccctgtgcatatccagagccagatcacgccccatgccatcatcttcctccccaacactgacggcatggagatgctgctgtgctacgaggacgaaggcgtctacgtcaacacatatgggcggatcattaaggacgtggtgctgcagtggggagagatgcccacctctgtagcctacatctgctccaaccagatcatgggctggggtgagaaagccattgagatccgctccgtggagacaggccacctggacggtgtcttcatgcacaaacgagcccagaggctcaagttcctgtgcgagcggaatgacaaggtgnttttcgcctncgtccgctctgggggcagcagccaagtttactttatgacgctgaaccgaaactgcatcatgaactggtgacagggccagcttggccccaaagccagacttccccaggccgncctcctttnccttcctggctttttgcttttcgactgggtttgattcactggagcctgctgggaacgggacctctgaccctgagcttttgggancacgngaccattctatttccttcccccaaaatttttc

SEQ ID NO: 215505 - DNA, 300 bp, Canis familiaris; identical to SEQ ID NO: 5398
  misc_feature (2)..(2): n is a, c, g, or t
  misc_feature (30)..(30): n is a, c, g, or t
  misc_feature (32)..(32): n is a, c, g, or t

SEQ ID NO: 215506 - DNA, 539 bp, Canis familiaris; identical to SEQ ID NO: 5399
  misc_feature (2)..(2): n is a, c, g, or t
  misc_feature (35)..(35): n is a, c, g, or t
  misc_feature (49)..(49): n is a, c, g, or t

SEQ ID NO: 215507 - DNA, 600 bp, Canis familiaris
tggcggagttgctggccaatgtggccagttccatcctgagccacatcaaagcctccctggcagctgtgcacctcttcaccgccaaggaggtgtctttctccaacaagccttacttccggggcgagttctgcagccaaggtgttcgtgagggcctcatcgtgggcttcatccgctccatgtgccagacagctcagagcttttgtgacagccctggggagaaggggggtgccacaccgcctgctctgctcctgctactctcccgcctttgcttggactatgagacagccaccatctcctacatcctcaccctcaccgatgaacagtttctcgtgcaggaccagtctccagtgacacctgtaagcacactgtgtgcagaggccagggagacagcacggcggttattgacccactatgtgaaggtgcagggcctggtcatatcacagatgctgcgcaaggctcagagcagtgactccagcaaaaggaccttctctgtgtatagcagctctcgccaacagggccgctatgcacccagctatacacccagtgccccaatggacactaatctcttgagcaacatccagaaactggtctctgaacgta

SEQ ID NO: 215508 - DNA, 600 bp, Canis familiaris
  misc_feature (27)..(27): n is a, c, g, or t
gggtcgacccacgcgtccggttctagnatcgcgagtggccgccctttttttcctttttatcatctgaaaaaagattactagtactaatcattgtagtggcatgagtgtgatttaacacttcagaagtcacattctcaaaaagagacaagtagaagccagcacccagcacagcccagatcttttcttacctctcctttcctcatttattactaaaggaatctggcggatagttttctctctctgcgctaccaaaacaaggcaaaaacaaaaaatgctttttattcctgtcaattggatggaaacacaaatgtcatggagctgtgtatcattgaaggaatctggtgtctgggatgaaattctttttaaagagcttcctgtaaaacacgtgaacaaactgtgagacaaaaggcatgggcgcgtgttggaagacttgtgacctgcagctgggactgtcacctccagcattcaccttcatgtgtcttcagcccccgcttctgggcaggggactctgtttggtcttagaatgtttggatataactgaattgtagttggtaaaaataatttgatgttgtgttgtgtttttttggtttttaaaaaaat

SEQ ID NO: 215509 - DNA, 454 bp, Canis familiaris; identical to SEQ ID NO: 5402
  misc_feature (2)..(2): n is a, c, g, or t
  misc_feature (32)..(32): n is a, c, g, or t

SEQ ID NO: 215510 - DNA, 558 bp, Canis familiaris; identical to SEQ ID NO: 5403
  misc_feature (2)..(2): n is a, c, g, or t
  misc_feature (481)..(481): n is a, c, g, or t
  misc_feature (520)..(520): n is a, c, g, or t
  misc_feature (536)..(536): n is a, c, g, or t
  misc_feature (545)..(545): n is a, c, g, or t

SEQ ID NO: 215511 - DNA, 230 bp, Canis familiaris; identical to SEQ ID NO: 5404
  misc_feature (2)..(2): n is a, c, g, or t

SEQ ID NO: 215512 - DNA, 469 bp, Canis familiaris; identical to SEQ ID NO: 5405
  misc_feature (2)..(2): n is a, c, g, or t

SEQ ID NO: 215513 - DNA, 600 bp, Canis familiaris
  misc_feature (493)..(493): n is a, c, g, or t
  misc_feature (559)..(559): n is a, c, g, or t
  misc_feature (582)..(582): n is a, c, g, or t
ccccggctccttcgcactctgcgcccgcgtctataagcgccactacatggacggacagaccccctgcctcatcgtctcctccaaggcggacctgcccgcgggcagcacgccccctggcctggcgcccgctgagttctgccgcagacaccggctgcccgcccctgccgccttctcccgggtgggcccagccgggctcagcgctgccgtcttcacccggctcgccaccatggctgccttcccacacctggctcatggggagctacacgccacctccttctggctgcgggtgaccctgggggccgttgggtttgcggtcactgccgtcctcagcatctcgctctacagggccctggtgaagagccgatgaggcctcaggcccccgggtgctggtattggggcacctgctcgagggggccttccttgtgtcggaacttccttctggggatactgcccacccccctgcccgagccccaagtgcagtcccccaggtctncgcagcacgcgtcctacccagctgcacatgccaggcgttacccgcttcggggatcacgtgttgganggactggggtcatggcgaggaanccggtgacccttaggccc

SEQ ID NO: 215514 - DNA, 474 bp, Canis familiaris; identical to SEQ ID NO: 5407
  misc_feature (2)..(2): n is a, c, g, or t

SEQ ID NO: 215515 - DNA, 600 bp, Canis familiaris
  misc_feature (524)..(524): n is a, c, g, or t
  misc_feature (551)..(551): n is a, c, g, or t
  misc_feature (586)..(586): n is a, c, g, or t
aagtgattaaagatgaataaaatagagcatttgtactagttttggaggacaacatcactcttaagtttgccacgtgaaactcaatagaaaaggggttttaaaaaatggaaattgaaagtttggaatgtttctgacctgcatagtgcaaatatagtatattcataacacgtttaactgtcagatctcactcaggttttaagattttgagctccctagtcttagaagagttcattaaatgtataatttacttcaaattctaaggaattaggtatttacttagtgatacagaaagttaaaataagatgtaacatatggccattaatgtacaggattaatgggatttttctattaaaatataacgaccatgaaaaaattgattagcttgttgcatttgttgccaaaattgggtgttcagttatagcttattcaattcccatttgtgggaattttgaaacaaaaaccaattgtcttacttggttagccattgattaaggcaacagcatatctgcaggaaaatatcttgnttgtagtaatacaccccaatagttggntttactcttgaaatgatttatttcacttaatttgnataattggtatgag

SEQ ID NO: 215516 - DNA, 511 bp, Canis familiaris; identical to SEQ ID NO: 5409
  misc_feature (2)..(2): n is a, c, g, or t
  misc_feature (41)..(41): n is a, c, g, or t
  misc_feature (234)..(234): n is a, c, g, or t
  misc_feature (345)..(345): n is a, c, g, or t
  misc_feature (392)..(392): n is a, c, g, or t
  misc_feature (412)..(412): n is a, c, g, or t
  misc_feature (455)..(455): n is a, c, g, or t

SEQ ID NO: 215517 - DNA, 600 bp, Canis familiaris
  misc_feature (519)..(519): n is a, c, g, or t
  misc_feature (531)..(531): n is a, c, g, or t
  misc_feature (537)..(537): n is a, c, g, or t
  misc_feature (553)..(553): n is a, c, g, or t
  misc_feature (573)..(573): n is a, c, g, or t
  misc_feature (579)..(579): n is a, c, g, or t
acagctgcattgtcctcgaaactagcagttatgatcacagaacagtattcaaaattattttcccccagttttagaaatctaaaattttacatgtaaattaaaaatgaagtgccataggggttttagctcatgacttgtcctctccttttccttccctgccaggccgagcagcagggctcctcactcctggggagtggggcttacctctggggctgctggagggaaagctggcactttgcctttgggccacggggcgtccttgggagcgtgtctgtcctcagacgttctgagtatggacccctcaggtgggttctgattccaaaccaggtggccagacgctttgcaccatccacacgtacactcaccagcagggcaacggacatctagtcggtgtgaacccaaggctgcgcacgaggagtccagcttcctgcgcaaggagctgccggtcattggaggagtgtgtgaggccagggacccgggcacccttttccctttggcaagtcagaaatgggaagaatncccaaagaaagncccggncatttccagccttcanaggggggtccctgatccagngccctnctgctgaacaacagggggggg

SEQ ID NO: 215518 - DNA, 372 bp, Canis familiaris; identical to SEQ ID NO: 5411

SEQ ID NO: 215519 - DNA, 434 bp, Canis familiaris; identical to SEQ ID NO: 5412
  misc_feature (29)..(29): n is a, c, g, or t
  misc_feature (80)..(80): n is a, c, g, or t
  misc_feature (268)..(268): n is a, c, g, or t
  misc_feature (324)..(324): n is a, c, g, or t
  misc_feature (327)..(327): n is a, c, g, or t
  misc_feature (345)..(345): n is a, c, g, or t
  misc_feature (375)..(375): n is a, c, g, or t
  misc_feature (381)..(381): n is a, c, g, or t
  misc_feature (409)..(409): n is a, c, g, or t
  misc_feature (425)..(425): n is a, c, g, or t

SEQ ID NO: 215520 - DNA, 810 bp, Canis familiaris; identical to SEQ ID NO: 5413
  misc_feature (659)..(659): n is a, c, g, or t
  misc_feature (756)..(756): n is a, c, g, or t
  misc_feature (784)..(784): n is a, c, g, or t

SEQ ID NO: 215521 - DNA, 600 bp, Canis familiaris
  misc_feature (571)..(571): n is a, c, g, or t
ttcactaccttatggttctgtctgccaactgggcttacgtgaaagatgcctgccggatgcagaaatacgaggacatcaagtcgaaggaggagcaagagcttcatgacatccactctactcgctccaaagagcggctcaacgcctacacataaatccgccctgcctgtcctgcctgccatctagatgcattggtgtttaacgaagggccatccaaccatccaaccttgtgaaaactaaaatgggagtgcttctcatcaatgatctgtagggtgacttatgaatcacctgaccacaattctttgttgtttagcacgtaatttcctaatttgttaaattggtgtgaacaaatctcttctacaagctcctatccagccttttcctttttttaaatttctcacactcatttaaataattctgtaagattgaagatactaacattgtcaagtgcagagattttatttgattttaaccacttcccatgtgttgatacataacaccttttgcattatttcttatggtttgagaagaaaaaagctttttatactttttagttttgatttcgggaactagnttaactacaggtaaccttcaagggaccat

SEQ ID NO: 215522 - DNA, 345 bp, Canis familiaris; identical to SEQ ID NO: 5415

SEQ ID NO: 215523 - DNA, 527 bp, Canis familiaris; identical to SEQ ID NO: 5416

SEQ ID NO: 215524 - DNA, 600 bp, Canis familiaris
  misc_feature (478)..(478): n is a, c, g, or t
  misc_feature (569)..(569): n is a, c, g, or t
tcctccctccataaggctggaggggaggcaagaggagaaggtagaggaggcagttaggatgatgctagacatcagagtagggggttatgggcaaccagatacacttggcctctgggtcgtgggaatcaaggaagtgattcatcctcttgaagatgctgacactagagagaggggctgctgtccccaggggcaaggcacactttgttcctattttaaagcctccctccttgctgcataattcccccacccagacctctgagccactgtagctgctgcctcccaaccccagtaacactgctgggtgaagccactgtcctacatcagataattcccaccctccagtgacctgctgttttttcctaacccaagggctcttgtggttcccctcctactccaatgcaaaatgtaccctcatactgtaggtagcactatattttatcgtttggggaatggaggcacaaacagaatgaagactggnttgtgctctgctttccatgggaagactggggatgaggggcaggcacaggactatctgtgcccacaaatagggctgagagggtccgctccangggtcctcctcacccctccaagccagaaaag

SEQ ID NO: 215525 - DNA, 600 bp, Canis familiaris
  misc_feature (585)..(585): n is a, c, g, or t
tggggtccaccattttgctcgagcggcttctgagtttgaaagcccagaaggagttttccttttccccgagcttcggatcatcagcaccatcacaagagaagtggagcctgaaggggaaggggacgaggaccccacagttcaagagtcgctggtgtctgaggagatcgtgcacgacctggatacctgcgaggtcacggtggacggggaggaactgaacccagcccaggagagcctggaggtggacatggcccgcctgcagcagaagggcattgcagtgagcggctccgacctgggcatggtctttacaggtgtggacaccatggccagctacgaggaggttctacgcctcctgcgctatcggaactggcacaccaggtctctgcttgaccggaagttcaagctcgtctgctcggagctgaatggccgctatgtcagcaacgagtttcaggtggaggtgaacgtcatccacgcggccagccccatggagcacgccagccacatggctggccagccgcagtttgtccacccggagcaccatgcctttcgttgacctctcgggtcacaacctggccagcccccacccgntcgcagttgtcccca

SEQ ID NO: 215526 - DNA, 471 bp, Canis familiaris; identical to SEQ ID NO: 5419

SEQ ID NO: 215527 - DNA, 600 bp, Canis familiaris
  misc_feature (551)..(551): n is a, c, g, or t
cctggttctgggcaatgtcaacgtgacactcctgagcaagcaggctaagttcgcctacaaggacgagtatgagaagttcaagctctacctcaccatcatcctcatcctcatctcctttacctgccgcttcctcctcaactccagggtgacagatgccgccttcaacttcctgctggtctggtactactgcacgctgaccatccgagagagcatcctcatcaacaatggctcccggatcaaaggctggtgggttttccatcattacgtgtctacgttcttgtcaggagtcatgctgacgtggcctgatggcctcatgtaccagaagttccggaaccagttcctgtctttctccatgtaccagagctttgtgcagttcctgcagtattactaccagagcggctgcctgtaccgcctgcgggccctgggcgagaggcacaccatggacctcaccgtggagggcttccagtcctggatgtggcgcggtctcacctttttgctgccctttctcttctttggacacttctggcagctttttaatgcgctgaccctgntcaacctggcccgggaccctgagtgcaaggagtggcaggtgctcatgtg

SEQ ID NO: 215528 - DNA, 391 bp, Canis familiaris; identical to SEQ ID NO: 5421
  misc_feature (1)..(1): n is a, c, g, or t
  misc_feature (14)..(14): n is a, c, g, or t

SEQ ID NO: 215529 - DNA, 600 bp, Canis familiaris
  misc_feature (457)..(457): n is a, c, g, or t
  misc_feature (588)..(588): n is a, c, g, or t
taaatatttatgataaaaatgcattatttttttaaagagcttgatgcaatttgtgataagtgatagtactcaacctgaatcctacccccagtcccaccctttgaccaaatcctccacaaacctttagctgttggttaattcactaactgtaaacacaaatgacatggtctggtttagaagttatttttttcagccttatgatagttaacatggtaagccttagcagtgaatagtcttcctttctaacaggtagacttacatgttctcaagaaatagggtaagatggggtactataataccaaattctaaatcatgagcattttctccgctgtgtatgtacatgaggcaaatcatgcatctttgagtgcagtttggcctggcccctgaagagaaaagcatgtcaccacacttgcagtaggggtactggggtttgaatggataccatcactcttttctncacaaacagtgcagagaactgtctggagtggcaatttgaacagattccctgacgttccctctgctccttccgtcctacagtaagtaaaagaaccacctgggggaacccgggagtctgaaaaaatcagctgngctcatagccaa

SEQ ID NO: 215530 - DNA, 600 bp, Canis familiaris
  misc_feature (569)..(569): n is a, c, g, or t
  misc_feature (584)..(584): n is a, c, g, or t
aaaacatctgggcctgttggagaaaaagaaagattacaagcttcgtgcagatgactaccggaaaaagcaagactacctcagagctctccggaagaaggctcttgaaaaaaatccagatgaattctactataaaatgactcgagttaaactccaggatggagttcacgttattaaggagactaaggaagaagtaactccagaacagctgaaactgatgagaacccaggatgtcaaatacatagaaatgaaaagggttgcggaagttaagaaaattgaaagactaaaatcagagctccatctgctggatttccaggggaagcaaaagaataagcatacgtttttttttgacaccaaaaaggaagttgagcagtttgatattgccactcacctgagaacagccccggaactagttgacagagtctttaacagacccacaatagagacattgcagaaggagaaggtgaagggggttaccccagcagattcgactgaagcgaatagctaaagaaaggcaaaagcagttttaactgcctgacacagcggattgaacgcgagaagaaattgtttgntattgcacagaaaantcaaacgcgcaagatc

SEQ ID NO: 215531 - DNA, 600 bp, Canis familiaris
  misc_feature (488)..(488): n is a, c, g, or t
  misc_feature (550)..(550): n is a, c, g, or t
  misc_feature (555)..(555): n is a, c, g, or t
  misc_feature (569)..(569): n is a, c, g, or t
  misc_feature (587)..(587): n is a, c, g, or t
  misc_feature (595)..(595): n is a, c, g, or t
tactgaatggtacagacgtgtgtacaaatagactctaacccagtgtaaagaagttgatgcattacagcctggcttgctttactctgaacattttaatcaaatgcttattttttttatgttgatctgtgtttctcccacattagggatgagggcaggaataatctcctgaaatacaaatcataaaggattctgtctagtttattagtattattaatattattattatttaaatctatttcccattgtaagggttttctcttcaaatacttctctttctttctgagggaaaaacatgtatttgaacaaagaaaggaggtaaactggcaatagaaagaggctgagatgggacgagataaatccaaggatttgtattctcactttctgaaatacttgtctcaaaataaatacgtagatttttattgttgtgcaatgaaatgtacgtgggccgtgaatagttggactctgtgaatggataagataagccccgngatacctgtaatgcattgagcccaaggagtaatacagactttaagacatggctgacctaaanggaanagttgggtctcganaatcactggatacagctnttgcttcnttaag

SEQ ID NO: 215532 - DNA, 600 bp, Canis familiaris
  misc_feature (454)..(454): n is a, c, g, or t
  misc_feature (482)..(482): n is a, c, g, or t
gctccggcagctggagacgaaccagctggacgtggacgccacactggaggagctgtcagtacagcaggagacagaggaccagaactatgacatcttccttgagatgatggaggcacgcagccgtggccatgcgtccccactggcagccaacgggcagagcccatcctcaggctcccagtctccggtagtgcctcccagcgctgtgtccacagggagctccagccccagcacaccccagccagccccacagatgcccctccacacgccctcagcctgcccctgtcccctgccccccacggaggccccactgccccctgcagcccctgccccacggcgcagcatcatctccaggctgtttgggacctcaccagctgctgaggcagccccttcagccccagagccagcctcagtcccagaggccccagtgaaagtccagaacgtgggaggattttgntcctgaagaaggccttgaccgcagcttnctggatgacactggccccagcagaatgagaagagagtcggagctaaggtcccacaggacagtgacagcgatgaggaggtcccagcggggaaccactggtagcaggtttcaggatgatg

SEQ ID NO: 215533 - DNA, 570 bp, Canis familiaris; identical to SEQ ID NO: 5426

SEQ ID NO: 215534 - DNA, 600 bp, Canis familiaris
  misc_feature (169)..(169): n is a, c, g, or t
  misc_feature (265)..(265): n is a, c, g, or t
  misc_feature (271)..(271): n is a, c, g, or t
  misc_feature (339)..(339): n is a, c, g, or t
  misc_feature (374)..(374): n is a, c, g, or t
  misc_feature (416)..(416): n is a, c, g, or t
  misc_feature (448)..(448): n is a, c, g, or t
  misc_feature (453)..(453): n is a, c, g, or t
  misc_feature (476)..(476): n is a, c, g, or t
  misc_feature (478)..(478): n is a, c, g, or t
  misc_feature (519)..(519): n is a, c, g, or t
  misc_feature (553)..(554): n is a, c, g, or t
  misc_feature (564)..(564): n is a, c, g, or t
  misc_feature (588)..(588): n is a, c, g, or t
agggagactctgtatgaggaggtgatatcagaaacctcttaaaactgggggggttccattgtatttccagaccttctgtaactcttgcaccccccccccatcccctgcagccaaatgaccctgtgactaacatctgtcaggcagctgacaaacagctattcacgcttgntgagtgggcgaagaggatcccacacttttcctccttgcctctggatgaccaggtcatattgctgcgggcaggctggaacgagctcctcattgcttncttctnccaccgatccattgatgttcgagatggcatcctccttgccacaggtcttcatgtgcaccgcaactcancccattctgcaggcgtgggagccatttttgatcgntccctcttcagggtgctgacagagctagtgtccaaaatgcgngacatgaggatggacaaacagagcttggctgnctganggcaatcattctgttcaatccanangccaagggcctttcaacctatgagggggaggtctgcggganaaatgttgcatactgggaccattgcaagcaaaanncctgacagcnggacggttgccagcggtggtacgnttctggcctagg

SEQ ID NO: 215535 - DNA, 600 bp, Canis familiaris
  misc_feature (347)..(347): n is a, c, g, or t
  misc_feature (371)..(371): n is a, c, g, or t
  misc_feature (457)..(457): n is a, c, g, or t
  misc_feature (524)..(524): n is a, c, g, or t
  misc_feature (538)..(538): n is a, c, g, or t
  misc_feature (587)..(587): n is a, c, g, or t
gacttaaagagaaactttctagtgagaaacaaaatgagactttcacatggagaaaataatttgatagtacttaatggaagtctgttcaattaaaaagtgtaatttataaaaggatactgtgcaaaaataagactgaatttaagttaatatatttatatattatatgtagaagataagttcatttatcttcttttttaagatgtatttaatgtaaattgcacacactccaactattaccttgcttttgcatatgaaaataggaaatactttggttttataagttattaatgtgaagttgatagttccacatcagcctatttataaaaatattatttccaagaaaaagntactattagcattaatgtatttgntaaactttttaacattctttatctggtattatttattacattgatatagaattatatgattcatagatttgaagattccatatggnataataggttaatttcacctgctttgaaggtggattcaattgactaactacatgaaaatgccgtccnctcatttacatgancacggcctgtttatcttgcctggaggtctcgatagaattattgattccnaaaatttttttat

SEQ ID NO: 215536 - DNA, 854 bp, Canis familiaris; identical to SEQ ID NO: 5429
  misc_feature (709)..(709): n is a, c, g, or t

SEQ ID NO: 215537 - DNA, 228 bp, Canis familiaris; identical to SEQ ID NO: 5430

SEQ ID NO: 215538 - DNA, 283 bp, Canis familiaris; identical to SEQ ID NO: 5431

SEQ ID NO: 215539 - DNA, 476 bp, Canis familiaris; identical to SEQ ID NO: 5432
  misc_feature (444)..(444): n is a, c, g, or t
  misc_feature (451)..(451): n is a, c, g, or t

SEQ ID NO: 215540 - DNA, 600 bp, Canis familiaris
  misc_feature (361)..(361): n is a, c, g, or t
  misc_feature (421)..(421): n is a, c, g, or t
  misc_feature (427)..(427): n is a, c, g, or t
  misc_feature (458)..(458): n is a, c, g, or t
  misc_feature (510)..(510): n is a, c, g, or t
  misc_feature (544)..(544): n is a, c, g, or t
  misc_feature (550)..(550): n is a, c, g, or t
  misc_feature (557)..(557): n is a, c, g, or t
ccccccccaactttatttagaaatatcttcatttttttgccttgttcccctttccctacttctatggaagggactaaaacaaaaaggtctaagctataatgtttagtgtgaaaataccttttttcttaaataattccatttacacagtaggaacaagaagaaaaagccttccagttttaggttccattgtaggatgtgccttcagaaacctgctgcacttttcggatacagttcaccaccttgctgtcttcacagctttggagaattttaaccaggagatcctgaaacatgaaaccaaatagactttgggttttatttttaattgatactttttcttttactttggtatttctttcttggnaccacactcaaagaaaaaaaaaatgagattagagagcagtctgtggaacaggtgtactgngtcggngtgcatggaaatgtcctgctggctggtgaanatggctggtaagaagcccgttataccagccaatgcaaatcaaattggatccngctcgggaaaacggccgggatgaaagagcccacncgaagnaatttgnataaactgaaaaaaaaacccaccttttctaatttttttatggc

SEQ ID NO: 215541 - DNA, 600 bp, Canis familiaris
  misc_feature (439)..(439): n is a, c, g, or t
  misc_feature (511)..(511): n is a, c, g, or t
  misc_feature (518)..(518): n is a, c, g, or t
  misc_feature (537)..(537): n is a, c, g, or t
  misc_feature (552)..(552): n is a, c, g, or t
ggcagcggttttaatggaggctttggctcaagcatggattctaaatcctctggctgggggatgtagacagtggggttggtagagactggtgggaattcaaatttttctaaacacatggtaagtatattgtaaaatacatatgtactaagaattttcaaaattggtttgttcagtgtggagtatattcagcagtatttttgacatttttctttagaaaaagaggaaaagctaaaggaattttataagttttgttacataaagggttgaaatattgagtgtttgaaagtgaactgctgtttgcctgatgggtaaaaaccaacacactacaattgatatcaaaaggtttctcctgtaatcttttatccctggacttgtcaagtgaattctttgcatgttcaaatggaaaccattgattagaactacattcttttctccttgntttaatttgaaccccaccatatggatttctcccttaggaagatctcctttttggagatcatggtgtcacagnggttggntctttggttttggttttgnttttttaacacttgnctcccttcacatgcaaagacaatatgaagccctcatttatctctgcag

SEQ ID NO: 215542 - DNA, 600 bp, Canis familiaris
  misc_feature (396)..(396): n is a, c, g, or t
  misc_feature (434)..(434): n is a, c, g, or t
  misc_feature (447)..(447): n is a, c, g, or t
  misc_feature (449)..(449): n is a, c, g, or t
  misc_feature (498)..(498): n is a, c, g, or t
  misc_feature (542)..(542): n is a, c, g, or t
  misc_feature (582)..(582): n is a, c, g, or t
  misc_feature (586)..(586): n is a, c, g, or t
ggtgcgcggcctgaaggccggggtgctcagccaggcggactacctcaacctggtgcagtgcgagacactcgaggacctgaagctgcacctgcagagcacagactacggcaacttcctggccaatgaggcatcgccgttgaccgtgtcagttattgatgaccggcttaaggagaagatggtggtggagttccgccacatgaggaaccatgcctatgagccactcgccagcttcctggacttcattacttacagctacatgatcgacaatgtcatcctgctcatcacgggcacgctgcaccagcgctctatcgccgagcttgtgcccaagtgccacccactaggcaagctttgagcagatggaaacttgtgaacattggccaaacacctgccgagctntacaatggcattcttggtggacacccccctggcgggcnttttcaggaatgnantttaaaacaaggaccttgttgagatgaacattgagatcatttgcaacanacttacagggctactggagttttttaaagttttgacctatgggnggacacggccagcattgccatctggagttgaagcgaccanagcnttatataacataaa

SEQ ID NO: 215543 - DNA, 600 bp, Canis familiaris
  misc_feature (268)..(268): n is a, c, g, or t
  misc_feature (272)..(272): n is a, c, g, or t
  misc_feature (289)..(289): n is a, c, g, or t
  misc_feature (364)..(364): n is a, c, g, or t
  misc_feature (366)..(366): n is a, c, g, or t
  misc_feature (370)..(370): n is a, c, g, or t
  misc_feature (393)..(393): n is a, c, g, or t
  misc_feature (404)..(404): n is a, c, g, or t
  misc_feature (425)..(425): n is a, c, g, or t
  misc_feature (448)..(448): n is a, c, g, or t
  misc_feature (453)..(453): n is a, c, g, or t
  misc_feature (481)..(481): n is a, c, g, or t
  misc_feature (497)..(497): n is a, c, g, or t
  misc_feature (506)..(506): n is a, c, g, or t
  misc_feature (542)..(542): n is a, c, g, or t
  misc_feature (570)..(570): n is a, c, g, or t
  misc_feature (586)..(586): n is a, c, g, or t
  misc_feature (598)..(598): n is a, c, g, or t
cttccagattgtgtacacggagtccaccatcgacttcctggacagagccatattcgatggggcctcgacacccacccaccacctgtccctgcacagcggtatgtgagtgtgggcagacagtccccgaggtccatgtctcccacctggtggcttcctgcatcactgtggggaccagggaacgtgtcaacgaaggtcacttcacctgtttcagatcaaaagagccgggggctagggggcgctgtggggaggagcccccagacctcactgntctntgatgaagggctttgtncggggaccgaggcttgccaagcagtggacgtgtggaagccaccacctactctgtgtctggggagcatttttggangngccntacttacaagaagttaattaatncccttaacccntcttaacccttttttaaaagnccaatagccacacttgatcttgncttgnttttgttggggggaccttaagtcctggncaacgttcttggtagntgttggggncatctttttgttgtgcggggccttggcttggggggnctgctttttctttgggaaaaaatgcttntggacttcgggggggnaaacctctttgngg

SEQ ID NO: 215544 - DNA, 600 bp, Canis familiaris
  misc_feature (465)..(465): n is a, c, g, or t
  misc_feature (481)..(481): n is a, c, g, or t
  misc_feature (509)..(509): n is a, c, g, or t
  misc_feature (520)..(520): n is a, c, g, or t
  misc_feature (544)..(544): n is a, c, g, or t
  misc_feature (575)..(575): n is a, c, g, or t
tcgggggattaccagaagattctgctgaagatctgcggtggcaacgactgagctgtgacgggtggctcacttccgtccacctgccggcaacagcaatgccaggacaaggtcaaaagagtgtccatctgttcctaacaaatccacaaaagagccccccaggtgtcccggtgcagcccgtccgtcagtagagcctggcccgtcctcctccgcctcctctcctgctccgtgcgtcatgctcgtgctgtaggatctgggtccctctctcagggcgcctcttcctccccagccctcacagccgcttgctgctaaagtagacattttatctcttgactcgtgcagtcattcccttttgcttgtggctgagtctcggcttctattagtcacgtaatctatatttttattcggaagcatctttttttttttttaatagtcctcggcagacagacacatacaggcctttgctgngtacacatttcaagtnaaaatggttggcgggggaacaccctgtnctcagtaaggngtaaaagggaagacctttacgggnaatctttgcgttggggagaaagggcataacntttgtatggccaactcactcttaaa

SEQ ID NO: 215545 - DNA, 600 bp, Canis familiaris
  misc_feature (462)..(462): n is a, c, g, or t
  misc_feature (525)..(525): n is a, c, g, or t
  misc_feature (544)..(544): n is a, c, g, or t
  misc_feature (572)..(572): n is a, c, g, or t
  misc_feature (575)..(575): n is a, c, g, or t
  misc_feature (597)..(597): n is a, c, g, or t
atgtgggcacatctcacttcatttcttcctcacgggaatggcaattctcatattggacaattgtttctgtcactcgttttagattttttttctaggcccgtattttactcttgttataaaggtgttatgtttaaccttaaggtaatttaaatgaacatatctttgtctcccaccaccaccaatgacccagagcatgaaaataatccaaaagaccaaggatattatctcttggctacaattgttacctttttaattgtcttgaaaacatgatggttttcggtcttatacaaaggtaactttcatactttcttatgaaaggatatcatatgaactgagaaactgggtttcaaatgggtacagttgatggtttctatcaaatatgtagcttctatgccccagctataggaaggctctatggagtggaatgagcagaatgtattatgctcaacgaaataagtcggntggggaaagacaaataccatttgatttacttattggggaattaagaaacaaaataatgacatntggaagggggaaaaaaaanggaacaagcctaggagacttgtaccgcnganacaactaggttgtgaaaggttnggg

SEQ ID NO: 215546 - DNA, 600 bp, Canis familiaris
  misc_feature (356)..(356): n is a, c, g, or t
  misc_feature (412)..(412): n is a, c, g, or t
  misc_feature (420)..(420): n is a, c, g, or t
  misc_feature (451)..(451): n is a, c, g, or t
  misc_feature (546)..(546): n is a, c, g, or t
  misc_feature (558)..(558): n is a, c, g, or t
  misc_feature (565)..(565): n is a, c, g, or t
  misc_feature (574)..(574): n is a, c, g, or t
  misc_feature (599)..(599): n is a, c, g, or t
cgagctgtgtgagcatgcatgtccacgggtgtgagtgtgagcatgagtgggcatgagaatgtgagtgcatgtgagcctgagtggaaatgtgtgcatgtgcaatgggagtatgagtgtgtatgtgtgagtgtgtgagcagcggaaggtgtgagcagagctctgtatctccacccacgggggtgcccccagtgccccggcaccccaacgaggggatgccttcccatctgatgtgtgcacagcaccgaggcccccagagggcacaaccccatccacacatcatccggagggggagctggggtagggaactgggaccagagctcagtggtgagcaacctggggctgcttggctatgggtnccccctacagggcttcccgacttcttgattcgcacacaatccttcgagtacttgtncaagaacnggggcccctttcccggcttaatgagccattntgttttccgggttaacgtccttgttgttccaccttcaaggaaggagaaaaccggggcccccgtcaatgcttttgttgcaaaagccggttggtttncaaatggggggncaagatntccgaggcncgattggttttgatgagccttatang

SEQ ID NO: 215547 - DNA, 442 bp, Canis familiaris; identical to SEQ ID NO: 5440
  misc_feature (393)..(393): n is a, c, g, or t

SEQ ID NO: 215548 - DNA, 600 bp, Canis familiaris
  misc_feature (453)..(453): n is a, c, g, or t
  misc_feature (483)..(483): n is a, c, g, or t
  misc_feature (551)..(551): n is a, c, g, or t
  misc_feature (563)..(563): n is a, c, g, or t
  misc_feature (585)..(585): n is a, c, g, or t
  misc_feature (596)..(596): n is a, c, g, or t
gtggtggaaggaggaccagcctaggagtaaggagacctggattctaacataggctctgtttctcacttcgtttgaggccttgggcaagccacttaaccttctcatggctgttccttcatctgtaaaataaggctattggaccagatgacctccaaggtctttccaaaagttctatcattctgtggtactataggttgccttgcaaattcaacctgctaaagtgattgatggcaaatattgcatgcttaagcctgggtttcttatgttgccgttaaactgtagaaatatgtaagatgatgggggaagaaaaaaaccttaagtaaatgaaaataacactagggaatgttgataaaacttatggcagccttcccaatcctcgcattttgtttcgttgttggtttaatgtcctttttctgtgatgtgttcccagtttttattttccatatgctctgnatgtgaagctggttttcattaagctgtggncaatatgtgctactagaacagaaatcactgtcacacttgctagaacagaacgaagtttgggcctttcntttctacaaagngatgttgggttatagacttaanttttaaatggncaag

SEQ ID NO: 215549 - DNA, 600 bp, Canis familiaris
  misc_feature (402)..(402): n is a, c, g, or t
  misc_feature (424)..(424): n is a, c, g, or t
  misc_feature (438)..(438): n is a, c, g, or t
  misc_feature (487)..(487): n is a, c, g, or t
  misc_feature (496)..(496): n is a, c, g, or t
  misc_feature (516)..(516): n is a, c, g, or t
  misc_feature (549)..(549): n is a, c, g, or t
  misc_feature (591)..(591): n is a, c, g, or t
  misc_feature (595)..(595): n is a, c, g, or t
ttttgaaagtggccggagatgtcaaactggacaaggaatctttgcctttaagtgtgcccgtgcagaagaattatttaacatgttgcaagagattatgcaaaataatagtataaatgtggtggaagagccagttgtagaaaggaataatcatcagacagaattggaagtccccagaacacctcgaacacctacaactccagggtttgctgctcagaatttacctaatgggatatccccgatatccctcatttggagatgcttcatcccatccctcaagcagacatccttctgtgggaagtgcacgcctgccttcagtaggtgaagaatctacacatcctttgcttgtagcggaggagcaagtacatacctatgtcaacactacaggagtgcaagaagagcggnaaaaccgcccagtgtgcatgtnccattggaggcgangatttttaatgttgaagcacacaccaaaagaagaaccaagttgttttgnggacagggncctcaaatttttttgaaccnaaggagcaaatttgtttaagaccaaccctgttnaaagaattgtggaaaagaaaaatgggcacttggaaaaccaancagnggagg

SEQ ID NO: 215550 - DNA, 631 bp, Canis familiaris; identical to SEQ ID NO: 5443
  misc_feature (500)..(500): n is a, c, g, or t
  misc_feature (517)..(517): n is a, c, g, or t
  misc_feature (541)..(541): n is a, c, g, or t
  misc_feature (568)..(568): n is a, c, g, or t
  misc_feature (589)..(590): n is a, c, g, or t
  misc_feature (618)..(618): n is a, c, g, or t

SEQ ID NO: 215551 - DNA, 600 bp, Canis familiaris
  misc_feature (374)..(374): n is a, c, g, or t
  misc_feature (380)..(380): n is a, c, g, or t
  misc_feature (399)..(399): n is a, c, g, or t
  misc_feature (433)..(433): n is a, c, g, or t
  misc_feature (466)..(466): n is a, c, g, or t
  misc_feature (496)..(496): n is a, c, g, or t
  misc_feature (516)..(516): n is a, c, g, or t
  misc_feature (527)..(527): n is a, c, g, or t
  misc_feature (541)..(541): n is a, c, g, or t
  misc_feature (551)..(551): n is a, c, g, or t
  misc_feature (557)..(557): n is a, c, g, or t
  misc_feature (569)..(569): n is a, c, g, or t
  misc_feature (586)..(586): n is a, c, g, or t
  misc_feature (596)..(596): n is a, c, g, or t
aattgctttttttcataaggtatttataaagttacttggggttgtctgagattgtatgaaaaaaaattagaaccacactgtatttacatttaccttgatgtttatttgtgggtggcagttttttctagttcttaggactgtggcagcctttggaatattttacaaatctgtgtcatccactacaactggcttatgtggctaggaaaggagaggaaaagaaatgaaatagttggttactaagttttttattcccacaaaaatgtctaatattaggagaactttaaataaacgtgatttaaatatggtggatgatttacagtccattatagccttacaagggttgcaaaaggaggggaaaaggtaattctttctgnctttgncagggatattctatacagnaataatttaagctataatttatttgttaaatggngcctctcaggaacttctttttgtctaacacttncctggtaaagggactatcttaaactttatngggggcttttcgttaacggnatttgaagccntttactaattagcnggtttttttntggaanaaaaaaaaaggntttgtttcctcggcttnaaaaatttgngaat

SEQ ID NO: 215552 - DNA, 600 bp, Canis familiaris
  misc_feature (375)..(375): n is a, c, g, or t
  misc_feature (389)..(389): n is a, c, g, or t
  misc_feature (402)..(402): n is a, c, g, or t
  misc_feature (429)..(429): n is a, c, g, or t
  misc_feature (433)..(433): n is a, c, g, or t
  misc_feature (447)..(447): n is a, c, g, or t
  misc_feature (489)..(489): n is a, c, g, or t
  misc_feature (491)..(491): n is a, c, g, or t
  misc_feature (499)..(499): n is a, c, g, or t
  misc_feature (572)..(572): n is a, c, g, or t
  misc_feature (579)..(579): n is a, c, g, or t
ttttttaagtatttgtaatttcttggtgatttaaggaagctaaaaaatgtatggcatcggtgcttcgctttttagaacatcaataagcagtctgagtaatcaattaggaattcaaaatccgttgcaaactcctgtatgacatcagagagccttaaacaatgccatgtgaaaggggtgagtttagcaggaatatatccatcagataacctcaggttgcatcagaatcttactttttaagagcatcgcaggctaaaacccgagtaaaaattcagccacgtatttcagaaaagaaaacggggtttctgccttggtcacacaaggggacagaaaaagcaaacagctgaggtagcatctgatgctcgggcccaacagaanggggcctgtgagtnctcacaccagcanggtctctcaaagaaccccgtggcagangacngccctggaattcanatgatgcttttccccttggtttgggttggtttgcactttatntnttagtgcncaaattaggccaaaaaagtttctggaaaaggatgtgatgggaatggacacggcccgagttaaaaatgtctacnataaggnccttctgaggcaacagggttc

SEQ ID NO: 215553 - DNA, 259 bp, Canis familiaris; identical to SEQ ID NO: 5446
  misc_feature (9)..(9): n is a, c, g, or t
  misc_feature (15)..(15): n is a, c, g, or t
  misc_feature (58)..(58): n is a, c, g, or t
  misc_feature (78)..(78): n is a, c, g, or t
  misc_feature (88)..(88): n is a, c, g, or t
  misc_feature (163)..(163): n is a, c, g, or t
  misc_feature (181)..(181): n is a, c, g, or t
  misc_feature (197)..(197): n is a, c, g, or t
  misc_feature (224)..(224): n is a, c, g, or t
  misc_feature (226)..(226): n is a, c, g, or t
  misc_feature (237)..(237): n is a, c, g, or t

SEQ ID NO: 215554 - DNA, 482 bp, Canis familiaris; identical to SEQ ID NO: 5447
  misc_feature (283)..(283): n is a, c, g, or t
  misc_feature (372)..(372): n is a, c, g, or t
  misc_feature (437)..(437): n is a, c, g, or t

SEQ ID NO: 215555 - DNA, 600 bp, Canis familiaris
  misc_feature (457)..(457): n is a, c, g, or t
  misc_feature (487)..(487): n is a, c, g, or t
  misc_feature (523)..(523): n is a, c, g, or t
  misc_feature (557)..(557): n is a, c, g, or t
  misc_feature (586)..(587): n is a, c, g, or t
ttcaatgacacttgtcttagccaataagagaaatgccaaaataatggatcaacctctgagatcaagggattgacttaaggcagacagaggaggccgtacagcgcaagtccgattctctagaaaccgttgtaccagcagcaaaaccccacctggtacattgagatcgagggtggatagtcagaaggactgtcaggcaggttgtcagcaccagagggagcggcaagggctcccgggagggccggtgagaatggcaccctgacattcaggaggcggactgcttggctgccgcccatggccagcgcagcaggagccagggatctcagggccccaaacctcgcacagatggggctgttgtgttttatgggattctattgtgtcaggttctggccgtttccccgctgacatgtcttgcagcttcgtgtaggagaaaagcatgatgtatctggtgagggacgangggtgagccaatggaccaaaaggtgtgggnccagcctttaaaaaaggcctggtgttaaggaagggngcttttttttcttaatttttcatcctaagtttgncttatttccaaaggttgggaaattcttgnnaagttccccgcca

SEQ ID NO: 215556 - DNA, 598 bp, Canis familiaris; identical to SEQ ID NO: 5449
  misc_feature (429)..(429): n is a, c, g, or t
  misc_feature (467)..(467): n is a, c, g, or t
  misc_feature (500)..(500): n is a, c, g, or t
  misc_feature (513)..(513): n is a, c, g, or t
  misc_feature (539)..(539): n is a, c, g, or t
  misc_feature (544)..(544): n is a, c, g, or t
  misc_feature (566)..(566): n is a, c, g, or t
  misc_feature (568)..(568): n is a, c, g, or t
  misc_feature (576)..(576): n is a, c, g, or t

SEQ ID NO: 215557 - DNA, 463 bp, Canis familiaris; identical to SEQ ID NO: 5450

SEQ ID NO: 215558 - DNA, 600 bp, Canis familiaris
  misc_feature (404)..(404): n is a, c, g, or t
  misc_feature (420)..(420): n is a, c, g, or t
  misc_feature (444)..(444): n is a, c, g, or t
  misc_feature (520)..(520): n is a, c, g, or t
  misc_feature (526)..(526): n is a, c, g, or t
  misc_feature (538)..(538): n is a, c, g, or t
  misc_feature (559)..(559): n is a, c, g, or t
  misc_feature (562)..(562): n is a, c, g, or t
  misc_feature (569)..(569): n is a, c, g, or t
  misc_feature (598)..(598): n is a, c, g, or t
aaggaataaattaaatccaaagtaaggaaaagaaaagaaatatgctaagagaagtccatgaaattgaaaaacagaaaccaacagagaaaaatcaacgtccaaagctggttctttgaaaagattaataaaatcagtactcctctagccaggctaagggaaaaaaaagacctaaattgctcctatcgcaaatgaagtaaagggacatcacaacagatcccatgaacattaaaagggtaaaaaagatatactatgaataactctatgcccacaagtttgatacttagatgcaatgaactaattccttgaaagacacaatctgccaaaactcacaagaagaaagacaatctgatatgaaaactgaataaataacctttcaaaacagaaagtgccagaccagattaggntcactggggaatttgncaaaaatttaagtaagaaattgtncagttctctcaatcttcaaatgatccagctttgggctataggctaatctgattaaaagggcccgctttaaaagcgnaagatntttccttaaaanaaggttgtagatctggaaggnctntcttagngggtagaacgaggaggacaaaaccttttntt

SEQ ID NO: 215559 - DNA, 527 bp, Canis familiaris; identical to SEQ ID NO: 5452
  misc_feature (387)..(387): n is a, c, g, or t
  misc_feature (396)..(396): n is a, c, g, or t
  misc_feature (415)..(415): n is a, c, g, or t
  misc_feature (420)..(420): n is a, c, g, or t
  misc_feature (479)..(479): n is a, c, g, or t
  misc_feature (503)..(503): n is a, c, g, or t
  misc_feature (515)..(515): n is a, c, g, or t

SEQ ID NO: 215560 - DNA, 514 bp, Canis familiaris; identical to SEQ ID NO: 5453
  misc_feature (39)..(39): n is a, c, g, or t
  misc_feature (76)..(76): n is a, c, g, or t
  misc_feature (232)..(232): n is a, c, g, or t
  misc_feature (288)..(288): n is a, c, g, or t
  misc_feature (375)..(375): n is a, c, g, or t
  misc_feature (378)..(378): n is a, c, g, or t
  misc_feature (404)..(404): n is a, c, g, or t
  misc_feature (411)..(411): n is a, c, g, or t
  misc_feature (427)..(427): n is a, c, g, or t
  misc_feature (429)..(429): n is a, c, g, or t
  misc_feature (466)..(466): n is a, c, g, or t
  misc_feature (468)..(468): n is a, c, g, or t
  misc_feature (487)..(487): n is a, c, g, or t
  misc_feature (511)..(511): n is a, c, g, or t

SEQ ID NO: 215561 - DNA, 541 bp, Canis familiaris; identical to SEQ ID NO: 5454
  misc_feature (435)..(435): n is a, c, g, or t
  misc_feature (443)..(443): n is a, c, g, or t
  misc_feature (475)..(475): n is a, c, g, or t
  misc_feature (498)..(498): n is a, c, g, or t
  misc_feature (506)..(506): n is a, c, g, or t
  misc_feature (519)..(519): n is a, c, g, or t
  misc_feature (532)..(532): n is a, c, g, or t

SEQ ID NO: 215562 - DNA, 600 bp, Canis familiaris
  misc_feature (444)..(444): n is a, c, g, or t
  misc_feature (453)..(453): n is a, c, g, or t
  misc_feature (489)..(489): n is a, c, g, or t
  misc_feature (542)..(542): n is a, c, g, or t
  misc_feature (558)..(558): n is a, c, g, or t
  misc_feature (587)..(587): n is a, c, g, or t
atggaggacctcgtgaatgaatttgatgagaagctcaatgtctgctttcggaactacaatgccaagacggagaccctagctcccgtgaagaaccagttccagatccaagaggaggaggagaccctgcaggatgaggaggtttgggatgctctgacagacaattacatcccttcactctcagaagactggagggacccaaacatggaggctctgaatggcaacagctcttgacactgagatccatgagaaagaagaggaagaagttcaatgagaagagtgaacatgattctggtatcaatgaggagcctctactcacagcagatcaggtgattgaggagattgaagaaatgatgcagaactccccagaccctgaggaagaagaagaggttctagaagaggaggatgagggagaaacctcttccagcagactcggtccttctgcangagatgcangccttgcccaaacctttaacaacaactggtcctacnaaggctgagcacctgtcggggtcggagctgaccgacttgttgaccaggtggangggcgccatccggacnttttggaggactggtgcaacacttgcccnccggacagcttga

SEQ ID NO: 215563 - DNA, 600 bp, Canis familiaris
  misc_feature (121)..(121): n is a, c, g, or t
  misc_feature (227)..(227): n is a, c, g, or t
  misc_feature (262)..(262): n is a, c, g, or t
  misc_feature (293)..(293): n is a, c, g, or t
  misc_feature (295)..(295): n is a, c, g, or t
  misc_feature (308)..(308): n is a, c, g, or t
  misc_feature (318)..(318): n is a, c, g, or t
  misc_feature (394)..(394): n is a, c, g, or t
  misc_feature (419)..(419): n is a, c, g, or t
  misc_feature (422)..(422): n is a, c, g, or t
  misc_feature (459)..(459): n is a, c, g, or t
  misc_feature (482)..(482): n is a, c, g, or t
  misc_feature (484)..(484): n is a, c, g, or t
  misc_feature (511)..(511): n is a, c, g, or t
  misc_feature (536)..(536): n is a, c, g, or t
  misc_feature (568)..(568): n is a, c, g, or t
  misc_feature (587)..(587): n is a, c, g, or t
  misc_feature (592)..(592): n is a, c, g, or t
atgtgcatcaacatgtgaaagcaatctaggtcacgagcacagaggaagttgccaggcaggtgcgtttggcagctccaggttggtttctgggtgccctccggtgaggggaaaagtgggagtntgccaagcgcaggccaccgagcagatggagctgcttcgagagtcggtggcgtgtcggtggcggctgtcccgagcatcagtgtctcaaagtgttcctctcttccctncccagctctttgtggagcatctgccccactccttncccgtgaggggtggacagagccccccacctntnactggagcccagncgccttccanagaggtggcttcagaggcaaaaacccttctgcatgttttaagcctttccttttcccaagaaggctgggggagaagnctttgtcttttccgttttaagtaanatnatatttaagaaaagaaacttgggactgacttattcgngccaaggaaagggggtttttggntnttccttggggtttggggtttttttaangagagggatcaagggtccccattgnaccttatacccaccaattattaaaatgggggngcctgttgattttggattncgaanggagggca

SEQ ID NO: 215564 - DNA, 600 bp, Canis familiaris
  misc_feature (355)..(355): n is a, c, g, or t
  misc_feature (376)..(376): n is a, c, g, or t
  misc_feature (422)..(422): n is a, c, g, or t
  misc_feature (439)..(439): n is a, c, g, or t
  misc_feature (453)..(453): n is a, c, g, or t
  misc_feature (567)..(567): n is a, c, g, or t
  misc_feature (579)..(579): n is a, c, g, or t
ctgacctctttggctgtgttgttgcccaagttggagtgatggacatgctgaagttccataaatacaccatcggccacgcctggaccaccgactacgggtgctcggacagcaaacaacactttgaatggcttatcaagtactcgccgctgcacaacgtgaggctcccggaggcggacgacacccagtacccgtccatgctgctcctgaccgccgaccacgacgaccgcgtggtcccgctgcactcgctcaagttcatcgccacccttcaatacgtggtgggccgaaccggaagcaaagcaacccgcttgtcatcacgtggacacaaggccggccacggggccgggaagcccacggncaaggtgatagaagaggtctncgacatgttcgcgttcatagcgcgcttgctggacatcgactggatncagtgagcgggccccgngggcccggcccggncgccgccgggaccttaaaggctttcacaccgtcacggcacccggagaagcaccgggcttcggccggccacggagccgggtccttggttaaacgcggccaggaacgcgggagttnttttaggttttntttacaggcctgggttttttt

SEQ ID NO: 215565 - DNA, 600 bp, Canis familiaris
  misc_feature (385)..(385): n is a, c, g, or t
  misc_feature (418)..(418): n is a, c, g, or t
  misc_feature (461)..(461): n is a, c, g, or t
  misc_feature (490)..(490): n is a, c, g, or t
  misc_feature (496)..(496): n is a, c, g, or t
  misc_feature (507)..(507): n is a, c, g, or t
  misc_feature (520)..(520): n is a, c, g, or t
  misc_feature (530)..(530): n is a, c, g, or t
  misc_feature (532)..(532): n is a, c, g, or t
  misc_feature (571)..(571): n is a, c, g, or t
  misc_feature (590)..(590): n is a, c, g, or t
  misc_feature (597)..(597): n is a, c, g, or t
cagaaatggttttatcaggatagaatattccaagggcttagaactcacctgccaggagctgtccaagggccagtcctgaagacaaacattctgggaggaatgaggattgagcagcccaggtctgctgagttaaccctttcctgcacaatggaaggaggaggaggaggaggaggggaaggaagaagaagcagaaggacaagattgcaatctcagaaatatatatatatatatatatatatatatatatatatatatatatattcatggtcatggtggtagtggtaggggaggatggtataaaataagacataccgctgtgtttgttggttctagaagaaaagaaaatgatgatcttttcttctgcatttagttatgctgcatttanttatgaaagagggaaaatgtgtgcatttttttnacttaaaacaggggtctgcaatttttttttcgtaaagggccanttagtgaatagcgagctgtgtgggctcantcagtntcccccaccantaaccctgtgtgnatcaggagtngnacaaatacacatatgcttggccatggttgtccaataagnttaggcacaactttaattnttaattngag

SEQ ID NO: 215566 - DNA, 600 bp, Canis familiaris
  misc_feature (303)..(303): n is a, c, g, or t
  misc_feature (344)..(344): n is a, c, g, or t
  misc_feature (363)..(363): n is a, c, g, or t
  misc_feature (399)..(399): n is a, c, g, or t
  misc_feature (418)..(418): n is a, c, g, or t
  misc_feature (426)..(426): n is a, c, g, or t
  misc_feature (463)..(463): n is a, c, g, or t
  misc_feature (473)..(473): n is a, c, g, or t
  misc_feature (490)..(490): n is a, c, g, or t
  misc_feature (492)..(492): n is a, c, g, or t
  misc_feature (506)..(506): n is a, c, g, or t
  misc_feature (529)..(529): n is a, c, g, or t
  misc_feature (588)..(588): n is a, c, g, or t
agagtttacggagtgtggtcagagcccttctgcagaggcccagagagtacggtgggccctggcagggcggagggggtaggtacccccaggctccatactggtcctcatgcctgccctccctactggccaatcctggacccaaggtcagggggtctcaggagaggggtctgccaaggtgcagcaagaaccaggctggaaaaataagttcctggatggggtcagaggggagcctagggcgcacacagcacaaacacacacacattgcccgctgtgtgggtaaggccagcagtgcccccccaccgnacacaggcccaccttttgaagggccaggtcagtttgagggntggttggacacaaacttgntcccagacatttacacaatgcacacaagaccttaanacgctacgggttccctaancttggggngggggggtagagggcccaccaagaaagggatgcttgntcccacggangggggggggtttgcttnangggtaaacttaatntgaccccccgttggacttctggnttaataatgggggggtgggaacccaatcttccccaaggtggccaagtgaaaggcaaccncaggaaaagttt

SEQ ID NO: 215567 - DNA, 600 bp, Canis familiaris
  misc_feature (420)..(420): n is a, c, g, or t
  misc_feature (427)..(427): n is a, c, g, or t
  misc_feature (452)..(452): n is a, c, g, or t
  misc_feature (461)..(461): n is a, c, g, or t
  misc_feature (479)..(479): n is a, c, g, or t
  misc_feature (482)..(482): n is a, c, g, or t
  misc_feature (489)..(489): n is a, c, g, or t
  misc_feature (510)..(510): n is a, c, g, or t
  misc_feature (513)..(513): n is a, c, g, or t
  misc_feature (530)..(530): n is a, c, g, or t
  misc_feature (546)..(546): n is a, c, g, or t
  misc_feature (559)..(559): n is a, c, g, or t
  misc_feature (585)..(585): n is a, c, g, or t
  misc_feature (590)..(590): n is a, c, g, or t
ctccttttgaagttttgtatcttcttgcaccaagtccgaattgaaaggttccagaatctacctcctaactgcattctatcctccctcaatcttttgggctaattgataagccccctattttttatctctaaaaatcatcaacaaggtctacgtccgatggctgctccagtcctttgagctgtagtcaggataatataacttgcctctgaatccaaacttaagaaaaaggaagcccataagcaaaggtactgaatcttttcctgccaatttctagaggtagaaattcatcctgctacagagagagagagagagagagagaagagaaagcaaagatagagagtgagagagcacactggcatttctacagggggtaggtaagctgacgcttgtaaatatttttacacaaaaatttactaaagncacaaanttttctgaagatccccctgggtganggtttggtntgccattaaaatcactgnggnagaaaanaaacattcctacatattttanttntattttgaaaaaaaatntttaatctacagtgcnaagttcaaaaaanaggaatttttctgaattttagggttntttcntttgcaaagg

SEQ ID NO: 215568 - DNA, 600 bp, Canis familiaris
  misc_feature (385)..(385): n is a, c, g, or t
  misc_feature (434)..(434): n is a, c, g, or t
  misc_feature (495)..(495): n is a, c, g, or t
  misc_feature (497)..(497): n is a, c, g, or t
  misc_feature (524)..(524): n is a, c, g, or t
  misc_feature (538)..(538): n is a, c, g, or t
  misc_feature (545)..(545): n is a, c, g, or t
  misc_feature (567)..(567): n is a, c, g, or t
  misc_feature (574)..(574): n is a, c, g, or t
  misc_feature (582)..(582): n is a, c, g, or t
  misc_feature (593)..(593): n is a, c, g, or t
agagtcggagacgctatccgcttccatccgtcgcgcagaccctgccggagccgctgccgctatggatgatcgggaggatctggtgtaccaggcgaagctggccgagcaggctgagcgatacgacgaaatggtggaatcaatgaagaaagtagcagggatggatgtggagttgacagttgaagaaagaaacctcctatctgttgcatataaaaatgtgattggagccagaagagcttcctggagaataatcagcagcattgaacagaaagaagaaaacaagggaggagaagacaaactaaaaatgatccgggaatatcggcaaatggttgagactgagctaaagttaatctggtgtgacattctggatgtactggacaaacacctnatttcagcagctaacactggcgaagtccaaggttttttttataaaatgnaaggggctaccacaggtattttgcttgaatttgccccaggaaatgacaggaaggagggttnanaaaaaaacctatggcttttaaagttgntagggatttggatngcagaantttcaccacgcatccaatttgnttagggnttggtttnaacttttttgntttaata

SEQ ID NO: 215569 - DNA, 600 bp, Canis familiaris
  misc_feature (272)..(272): n is a, c, g, or t
  misc_feature (396)..(396): n is a, c, g, or t
  misc_feature (412)..(412): n is a, c, g, or t
  misc_feature (414)..(414): n is a, c, g, or t
  misc_feature (461)..(461): n is a, c, g, or t
  misc_feature (471)..(471): n is a, c, g, or t
  misc_feature (478)..(478): n is a, c, g, or t
  misc_feature (511)..(511): n is a, c, g, or t
  misc_feature (547)..(547): n is a, c, g, or t
  misc_feature (563)..(563): n is a, c, g, or t
  misc_feature (582)..(582): n is a, c, g, or t
  misc_feature (588)..(588): n is a, c, g, or t
aatgatcgacctttttaaggctgagtgggtttcttcagtttgtgtgcaagtttcaagaaatggaaggactgaccaggtttgggtccctcaggatgactggacagggtacacccctcgtggtaaagacgacgaaatcccgtgccgaagaatgcggagtggcagctacatcaaagccatgggagatgaagacagtggtgactccgacacaagtccaagccttctcccaaagttgctgcacgaagagaaagctatctcaaggctactcagccatnccttacagaactcaccacactcaagatttccaatgaacactcccccaaactccagatccggagtcatagttacctgagggcagtaagtgaaagtctcatcaacccgaaagcctggacagccttnacccttgctgggctgntnacattaacaaaaggttccgttttaggaatgagaagcttcatgcgagnccttgagccnccttcanccaagtgagccgaaatggaggtgaacgggcaantttgagtcgtgtgcgagtcggggtcaacgactggantccagcgggggaaagntgaccttccctccccggtntttcgntgcggacccaat

SEQ ID NO: 215570 - DNA, 513 bp, Canis familiaris; identical to SEQ ID NO: 5463
  misc_feature (375)..(375): n is a, c, g, or t
  misc_feature (392)..(392): n is a, c, g, or t
  misc_feature (399)..(399): n is a, c, g, or t
  misc_feature (407)..(407): n is a, c, g, or t
  misc_feature (440)..(440): n is a, c, g, or t
  misc_feature (449)..(449): n is a, c, g, or t
  misc_feature (468)..(468): n is a, c, g, or t

SEQ ID NO: 215571 - DNA, 600 bp, Canis familiaris
  misc_feature (347)..(347): n is a, c, g, or t
  misc_feature (362)..(362): n is a, c, g, or t
  misc_feature (410)..(410): n is a, c, g, or t
  misc_feature (444)..(444): n is a, c, g, or t
  misc_feature (458)..(458): n is a, c, g, or t
  misc_feature (465)..(465): n is a, c, g, or t
  misc_feature (483)..(483): n is a, c, g, or t
  misc_feature (517)..(517): n is a, c, g, or t
  misc_feature (531)..(531): n is a, c, g, or t
  misc_feature (538)..(538): n is a, c, g, or t
  misc_feature (597)..(597): n is a, c, g, or t
ccaaaccgctcacatcactcaacaggccattgtagctcagaatgctgcggttcaggctgtcaacgcacactccaacatcttgaaagcagccatggacaattcggagattgcaggtgagaagaagtctgctcagtggcgcacagtggagggtgcattgaaggaacgcagaaaggcagttgatgaggctgctgatgcccttctcaaagccaaagaagagctagaaaagatgaaaagtgtaattgaaaatgcaaaaaaagaagaggttcctggggccaaatctcatataactgctgcagaggggaaacttcacaacatgataagttgatctggataatgtggtccaaaangtcaaagcagctcantcttgaggctaaggttgtgtcttaatatcatgagctggtggtccaagncccgggatgacttttaaccagaactgggccggtnttacttccaaaatncttgccngatggaaagggttgagtnttttgttttacttgacagctgctactggagatcngaattcctggatgnttattcncatcgccgatttgcccacttaatagagagttgccgaccaaaagccccgagaagcgccanttt

SEQ ID NO: 215572 - DNA, 600 bp, Canis familiaris
  misc_feature (445)..(445): n is a, c, g, or t
  misc_feature (447)..(447): n is a, c, g, or t
  misc_feature (504)..(506): n is a, c, g, or t
  misc_feature (516)..(516): n is a, c, g, or t
  misc_feature (544)..(544): n is a, c, g, or t
  misc_feature (547)..(548): n is a, c, g, or t
  misc_feature (575)..(575): n is a, c, g, or t
acgcccgcggcatctggcacaatgacaataagaccttcctggtgtggatcaacgaggaagaccacctgcgggtcatctccatgcagaaagggggcaacatgaaggaggtgttcactcggttctgcaacggcctcacccagattgaaacacttttcaagtcaaagaattacgaattcatgtggaaccctcacctgggctacatcctcacctgcccatccaacctgggcacaggcctgcgggcaggtgtgcacatcaagctgccccacctgggcaagcacgagaagttcccggaggtgctcaagcggcttgcggcttcagaaacgaagcacaagtggtgtggacacaactgcggtgggtggcgtctttgatgtttcaacgcaaaccgctgggctttttaaaagtggagctggtacaaatggtggtggatggtgtgaacttctcattnanatggaacaacggctggagcaagggcaggccatcgataaccttttgcttgccaaaaannnagggcccaanccgaacttgcacaacacaaacccggtgnttnntaattattgccgggagggcccccttcncccttttagtttgcaattgggggtg

SEQ ID NO: 215573 - DNA, 600 bp, Canis familiaris
  misc_feature (268)..(268): n is a, c, g, or t
  misc_feature (440)..(440): n is a, c, g, or t
  misc_feature (449)..(449): n is a, c, g, or t
  misc_feature (472)..(472): n is a, c, g, or t
  misc_feature (509)..(509): n is a, c, g, or t
  misc_feature (525)..(525): n is a, c, g, or t
  misc_feature (579)..(579): n is a, c, g, or t
  misc_feature (595)..(595): n is a, c, g, or t
tttacttaggtggggaattaagtttgggttatggagaatatatgtctgaattggaggcgacttgaagatggagtggttggagggtaagaggggtggcggcggcaggggcaatttttgcttcttgggttaggctgtggcttgttagaaaacctcattttcttctcatgactttgattccctgacaattcttttgcactgttggcgcttccgatctctgccagaatgctatgtcatgatcatttacttggaatttctcacatctcacctnctcttttcttctttcaatatgaagcaagtgtatgattctttatgatggtgcaaacaagaattaccagagaaatagtaattattcaatttcttctgaagtggtttccaattgtatatttaggattcctgtgaaaaaaggctgagaataaccaacatctttgtttctaagattnctttggggncagggagtaatggagtagaatanaaaaaatcatcatctaagtatctaaaataaacttcanattgtaatacccgttnggttaacaaccctttatcttaaaatccataaatgggaaaggggaagactaccanctagggtttgtttggntaatt

SEQ ID NO: 215574 - DNA, 475 bp, Canis familiaris; identical to SEQ ID NO: 5467
  misc_feature (229)..(229): n is a, c, g, or t
  misc_feature (243)..(243): n is a, c, g, or t
  misc_feature (249)..(249): n is a, c, g, or t
  misc_feature (403)..(403): n is a, c, g, or t
  misc_feature (446)..(446): n is a, c, g, or t
  misc_feature (449)..(449): n is a, c, g, or t
  misc_feature (459)..(459): n is a, c, g, or t

SEQ ID NO: 215575 - DNA, 508 bp, Canis familiaris; identical to SEQ ID NO: 5468
  misc_feature (470)..(470): n is a, c, g, or t
  misc_feature (472)..(472): n is a, c, g, or t
  misc_feature (489)..(489): n is a, c, g, or t
  misc_feature (495)..(495): n is a, c, g, or t

SEQ ID NO: 215576 - DNA, 438 bp, Canis familiaris; identical to SEQ ID NO: 5469
  misc_feature (265)..(266): n is a, c, g, or t
  misc_feature (350)..(350): n is a, c, g, or t
  misc_feature (424)..(424): n is a, c, g, or t
  misc_feature (426)..(426): n is a, c, g, or t

SEQ ID NO: 215577 - DNA, 600 bp, Canis familiaris
  misc_feature (208)..(208): n is a, c, g, or t
  misc_feature (418)..(418): n is a, c, g, or t
  misc_feature (434)..(434): n is a, c, g, or t
  misc_feature (458)..(458): n is a, c, g, or t
  misc_feature (468)..(468): n is a, c, g, or t
  misc_feature (491)..(491): n is a, c, g, or t
  misc_feature (524)..(524): n is a, c, g, or t
  misc_feature (526)..(526): n is a, c, g, or t
  misc_feature (556)..(556): n is a, c, g, or t
  misc_feature (566)..(567): n is a, c, g, or t
  misc_feature (590)..(590): n is a, c, g, or t
  misc_feature (598)..(598): n is a, c, g, or t
ctttttctgtatcctgacatttttctgggttaaaatccctttttttggtgaaatcaaacacttgttttaaagtctttcttgggtgacatgaaaagttggcagcccctctctttgcctccctcaaatttagaaatactttcaaattctaagaatcatgtttcattttcacgtttaaaaaaatgcagactgggacgccggggtggctcancagtttagcgcctgccttcagcccagggcatgatcctggagacccgggaccgagtcccacatcgggctccctgcatggagcctgcttctccctctgcctgggtctctgcctctgtgtgtgtgtgtgtgtctctcatgaataaataaataaaatcttaaaaaaaaaaaaaaaaaaagcagactaagcccccctgtgtgcctggcacgcttntagtgcttgggggtanggcacaataaaattagaaggtttnttggaaagancggtaccatccccttcaattggnaagccctggccagaacactttaactgggttttngnggggcttcaaaaatggctggcttgggctgncaagccagannttttaccaaggaaaaacactttntttttttnca

SEQ ID NO: 215578 - DNA, 600 bp, Canis familiaris
  misc_feature (432)..(432): n is a, c, g, or t
  misc_feature (451)..(451): n is a, c, g, or t
  misc_feature (507)..(507): n is a, c, g, or t
  misc_feature (526)..(526): n is a, c, g, or t
  misc_feature (531)..(531): n is a, c, g, or t
  misc_feature (534)..(534): n is a, c, g, or t
  misc_feature (563)..(563): n is a, c, g, or t
  misc_feature (580)..(580): n is a, c, g, or t
  misc_feature (597)..(598): n is a, c, g, or t
aaagagaagtctctccaagtagcagagagatcctggatgaagtaagaataataatggcagataaggaggttgataacaggggaaatgctgagaaggaaatacccatttctacagtctcatccagtacccaggtgtcctgcccactatgtgaccaaggcttcccacccacaaagattgagcgacatgccatgtactgcaatgggctgatagggcaagacacaggtaaaacttacctggatttatcaaactattttctttgcatggttgttttgtaatcctgtacaatggatgcagtacaggaaaaagagaccactctccctcaaagttaaaggtggtggggttatttatttatttatttttttctttctcctatctacttaattcttcagtacttttcggggtctttattactttggcaggtatgctatttgntgacatactcaggagaaanggagaggggaaaaactttcatcttttaatggttcaacttattctttgggggattgnaaaccaaaatggaccttgnatttnatnttattaagcagaatttgggactccttggngttggggaactaaattntaaggtgccggtttttnnaa

SEQ ID NO: 215579 - DNA, 658 bp, Canis familiaris; identical to SEQ ID NO: 5472
  misc_feature (382)..(382): n is a, c, g, or t
  misc_feature (455)..(455): n is a, c, g, or t
  misc_feature (515)..(515): n is a, c, g, or t
  misc_feature (528)..(528): n is a, c, g, or t
  misc_feature (534)..(534): n is a, c, g, or t
  misc_feature (555)..(555): n is a, c, g, or t
  misc_feature (577)..(577): n is a, c, g, or t
  misc_feature (591)..(591): n is a, c, g, or t
  misc_feature (595)..(595): n is a, c, g, or t
  misc_feature (602)..(602): n is a, c, g, or t
  misc_feature (636)..(636): n is a, c, g, or t

SEQ ID NO: 215580 - DNA, 600 bp, Canis familiaris
  misc_feature (514)..(514): n is a, c, g, or t
  misc_feature (537)..(537): n is a, c, g, or t
  misc_feature (558)..(558): n is a, c, g, or t
atgaccaatgcaacttttattggtgatcatatgaagaagggtcctaccaggccacctcgaccaagcaccccagacctttctaaggcaaggggttcccctccaacatccagtaatgttgtacaaggacagattaaacaagttcctgctcctgtcatttccgctcggtctgatgctgatcactctggctctgactctgcttctactcctgctttacatacctgtttcttagtaaatgaaggatggagtcagttagctgctatgcattgtgttatgctgccagacctgctgggattagacaaatttaggcctccacttctagagatgctggctcggagatggcaagatcgatgcttggaggtcagggaagctgcacaggccctgcttctagctgaattgagaagaattgagcaggctgggaggaaagaagccatcgatgcctgggccccttatttaccacagtatatggaccacgtcatatcacctggagtctagcagaagccatgcagactatcancactgctctgatgccctggggcngaagccaaggccaggaggaanacatgaccttcaaagatgacatacaactggtggttggaagtt

SEQ ID NO: 215581 - DNA, 442 bp, Canis familiaris; identical to SEQ ID NO: 5474

SEQ ID NO: 215582 - DNA, 494 bp, Canis familiaris; identical to SEQ ID NO: 5475
  misc_feature (319)..(319): n is a, c, g, or t
  misc_feature (445)..(445): n is a, c, g, or t
  misc_feature (486)..(486): n is a, c, g, or t

SEQ ID NO: 215583 - DNA, 472 bp, Canis familiaris; identical to SEQ ID NO: 5476
  misc_feature (353)..(353): n is a, c, g, or t
  misc_feature (359)..(359): n is a, c, g, or t
  misc_feature (386)..(387): n is a, c, g, or t
  misc_feature (398)..(398): n is a, c, g, or t
  misc_feature (413)..(413): n is a, c, g, or t
  misc_feature (416)..(416): n is a, c, g, or t
  misc_feature (445)..(445): n is a, c, g, or t
  misc_feature (447)..(447): n is a, c, g, or t

SEQ ID NO: 215584 - DNA, 515 bp, Canis familiaris; identical to SEQ ID NO: 5477
  misc_feature (421)..(421): n is a, c, g, or t
  misc_feature (485)..(485): n is a, c, g, or t
  misc_feature (494)..(494): n is a, c, g, or t

SEQ ID NO: 215585 - DNA, 510 bp, Canis familiaris; identical to SEQ ID NO: 5478
  misc_feature (429)..(429): n is a, c, g, or t
  misc_feature (500)..(500): n is a, c, g, or t

SEQ ID NO: 215586 - DNA, 516 bp, Canis familiaris; identical to SEQ ID NO: 5479
  misc_feature (439)..(439): n is a, c, g, or t

SEQ ID NO: 215587 - DNA, 498 bp, Canis familiaris; identical to SEQ ID NO: 5480
  misc_feature (388)..(388): n is a, c, g, or t
  misc_feature (417)..(417): n is a, c, g, or t
  misc_feature (472)..(472): n is a, c, g, or t
  misc_feature (497)..(497): n is a, c, g, or t

SEQ ID NO: 215588 - DNA, 600 bp, Canis familiaris
  misc_feature (462)..(462): n is a, c, g, or t
  misc_feature (482)..(482): n is a, c, g, or t
  misc_feature (485)..(485): n is a, c, g, or t
  misc_feature (522)..(522): n is a, c, g, or t
  misc_feature (544)..(544): n is a, c, g, or t
  misc_feature (560)..(560): n is a, c, g, or t
  misc_feature (563)..(563): n is a, c, g, or t
  misc_feature (587)..(587): n is a, c, g, or t
cctccccggctgcccgggaggcgcggcgggcgggcctgccggggggcccggctgcggagggctccctggcgcccggatcccgccacaaagggcttcgccgacccgcagcggcgcgtgtggccaccgggagcatcccctggggccgcaggagccgagggcgatgcccctcctaaccccacagacccaagaggacggcgactacagcctggtggccagccttgacaacgtcaggcatctctccactatcctgaaggctattcatttccgagatcatgcgacgtgtttcgccactaaaaacggaatcaaggttacggtggaaaatgcaaagtgtgtgcaagcaaatgcttttattcaggctggaatatttcaagagtttatagttcaagaagagtcttgttactttttcgaataaattaactatccttttaaactggttatctatttttggatcaagtcctatgncaagggactttaactggacnttngatgtgttaccaaggtattgggtaccctttgatgctntttttaaaaaaagaggaatggngaaaagtttgaaaatnaanactaagaacccgaggagactttgntttttatttttca

SEQ ID NO: 215589 - DNA, 502 bp, Canis familiaris; identical to SEQ ID NO: 5482
  misc_feature (274)..(274): n is a, c, g, or t
  misc_feature (418)..(418): n is a, c, g, or t
  misc_feature (430)..(430): n is a, c, g, or t
  misc_feature (449)..(449): n is a, c, g, or t
  misc_feature (498)..(498): n is a, c, g, or t

SEQ ID NO: 215590 - DNA, 600 bp, Canis familiaris
  misc_feature (414)..(414): n is a, c, g, or t
  misc_feature (439)..(439): n is a, c, g, or t
  misc_feature (453)..(453): n is a, c, g, or t
  misc_feature (486)..(486): n is a, c, g, or t
  misc_feature (489)..(489): n is a, c, g, or t
  misc_feature (515)..(515): n is a, c, g, or t
  misc_feature (547)..(547): n is a, c, g, or t
  misc_feature (552)..(552): n is a, c, g, or t
  misc_feature (561)..(561): n is a, c, g, or t
  misc_feature (577)..(577): n is a, c, g, or t
  misc_feature (587)..(587): n is a, c, g, or t
tggagccctaggatgcccctcacacagaccagtagtgacagcccagttgcttcatggacctcaaaatggctccaaccacagcagtggttagcaaatagcacgttccagtgctcagtgattctgaactaaaggaggcaccatttcagatgatgtcaccattctaagaaaacgcctcattctgcagttccttaacaaatatttctgagtaagtcccaaaaaccaagcactgctctgggtgccaggaatgagcagtggtcaagagagaccatggttgagacgcagtatttgagacctgaaagtagatgagtgggactaaaaaccacagcagaatcgacatgctgtaaacacatggttgtctcgggaggcctctgaagatggggaggagggtttggtcttactagctttctcatctgnggcttagagggaaaccaaaccaacnccccggaggttttnaataaatttaatggattaaatttttctggaatnttncattaaaaattaacttccctttaaanattgggcagtggtaactttttgcccaccgccnggccnaaaagggtnaaaggaaaaagctggncattaactgnttgtttgctggaa

SEQ ID NO: 215591 - DNA, 535 bp, Canis familiaris; identical to SEQ ID NO: 5484

SEQ ID NO: 215592 - DNA, 600 bp, Canis familiaris
  misc_feature (307)..(307): n is a, c, g, or t
  misc_feature (335)..(335): n is a, c, g, or t
  misc_feature (343)..(343): n is a, c, g, or t
  misc_feature (382)..(382): n is a, c, g, or t
  misc_feature (396)..(396): n is a, c, g, or t
  misc_feature (405)..(405): n is a, c, g, or t
  misc_feature (424)..(424): n is a, c, g, or t
  misc_feature (430)..(430): n is a, c, g, or t
  misc_feature (437)..(437): n is a, c, g, or t
  misc_feature (478)..(478): n is a, c, g, or t
  misc_feature (483)..(483): n is a, c, g, or t
  misc_feature (485)..(485): n is a, c, g, or t
  misc_feature (512)..(512): n is a, c, g, or t
  misc_feature (526)..(526): n is a, c, g, or t
  misc_feature (529)..(529): n is a, c, g, or t
  misc_feature (538)..(538): n is a, c, g, or t
  misc_feature (557)..(557): n is a, c, g, or t
  misc_feature (563)..(563): n is a, c, g, or t
  misc_feature (573)..(573): n is a, c, g, or t
  misc_feature (590)..(590): n is a, c, g, or t
  misc_feature (598)..(598): n is a, c, g, or t
ctcgcctcgatgaactgggaggtgtgtatctccagtttgaagaaggactggaaataacagcattatttgtggctgccacctacaagctcatggaccacgtggggactgagccatccattaaggaggatcaggtcatccaactaatgaatgcaatcttcagcaagaagaactttgaatcactctcagaagccttcagtgtggcctcaagctgcagctgcgctctctcaaaatcgctatcatgtgccagttgtagttgtgcctgaagggactccttccgacactcatgaacaggctatccttcggctgnaaggtcaccaatgttctatctcagcctntgactcangccactgttaaactagaacatgcttaaatctgttgcttncaaaagccactgtncttcaaaanacgttttttaccccttgangggatngttttgnactaaactttatgaaaggcaaaatttccaggggtttttttnacttntnttgcaaaaggggaaggggacaaccgtncaattgcaaaaggntanagcttaaangtaaaaattccctgaagtnggatcnaaaggtgacnttccttgggaaaggganaaaattgncc

SEQ ID NO: 215593 - DNA, 600 bp, Canis familiaris
  misc_feature (435)..(435): n is a, c, g, or t
  misc_feature (448)..(448): n is a, c, g, or t
  misc_feature (463)..(463): n is a, c, g, or t
  misc_feature (500)..(500): n is a, c, g, or t
  misc_feature (510)..(510): n is a, c, g, or t
  misc_feature (522)..(522): n is a, c, g, or t
  misc_feature (531)..(531): n is a, c, g, or t
  misc_feature (553)..(553): n is a, c, g, or t
  misc_feature (564)..(564): n is a, c, g, or t
  misc_feature (569)..(569): n is a, c, g, or t
  misc_feature (589)..(589): n is a, c, g, or t
ccgtttacttggacctagaaaaggactttgctgatgaggttgtacaccctggagacctcaagaattctgtcgaagtcgccctgaacaagttgttggatcctatccgggaaaagtttaatactcctgcactgaagaaactgccagtgctgcctacccagatccctcgaagcagagtaaggccagccagggagcggggaagggccaacgggtgcatgacatcagacagagagcctgtcagtgggcttcagggaaaggtcggtctcaaactgagagccctagaagccagggggtctgaagtgcaaggatatcctaccccattaactcctggaatggaacttgagtcatcttgatctaggtctgggcgatactgtgaagtgattacatcctgttgtatgaaagtcttctggtgtgagatcatactatgatgctttactnaatgttctttggntagagaccactgggntagaccatgaggtaccaactggtcaggcaaacttggncagttcttanggaagttatttnaagtttggntaaacctttccaatcttttgangggtttattgncctcnctatcatgaggtggaattanatgggggtttg

SEQ ID NO: 215594 - DNA, 428 bp, Canis familiaris; identical to SEQ ID NO: 5487
  misc_feature (370)..(370): n is a, c, g, or t
  misc_feature (422)..(422): n is a, c, g, or t

SEQ ID NO: 215595 - DNA, 424 bp, Canis familiaris; identical to SEQ ID NO: 5488
  misc_feature (241)..(241): n is a, c, g, or t
  misc_feature (266)..(266): n is a, c, g, or t
  misc_feature (269)..(269): n is a, c, g, or t
  misc_feature (294)..(294): n is a, c, g, or t
  misc_feature (331)..(331): n is a, c, g, or t
  misc_feature (408)..(408): n is a, c, g, or t

SEQ ID NO: 215596 - DNA, 308 bp, Canis familiaris; identical to SEQ ID NO: 5489

SEQ ID NO: 215597 - DNA, 522 bp, Canis familiaris; identical to SEQ ID NO: 5490
  misc_feature (464)..(465): n is a, c, g, or t
  misc_feature (482)..(482): n is a, c, g, or t
  misc_feature (500)..(500): n is a, c, g, or t
  misc_feature (516)..(516): n is a, c, g, or t

SEQ ID NO: 215598 - DNA, 521 bp, Canis familiaris; identical to SEQ ID NO: 5491
  misc_feature (424)..(424): n is a, c, g, or t
  misc_feature (493)..(493): n is a, c, g, or t
  misc_feature (516)..(516): n is a, c, g, or t

SEQ ID NO: 215599 - DNA, 402 bp, Canis familiaris; identical to SEQ ID NO: 5492
  misc_feature (311)..(311): n is a, c, g, or t
  misc_feature (378)..(378): n is a, c, g, or t

SEQ ID NO: 215600 - DNA, 307 bp, Canis familiaris; identical to SEQ ID NO: 5493

SEQ ID NO: 215601 - DNA, 501 bp, Canis familiaris; identical to SEQ ID NO: 5494
  misc_feature (370)..(370): n is a, c, g, or t
  misc_feature (396)..(396): n is a, c, g, or t
  misc_feature (413)..(413): n is a, c, g, or t
  misc_feature (426)..(426): n is a, c, g, or t
  misc_feature (477)..(477): n is a, c, g, or t

SEQ ID NO: 215602 - DNA, 582 bp, Canis familiaris; identical to SEQ ID NO: 5495
  misc_feature (332)..(332): n is a, c, g, or t
  misc_feature (409)..(409): n is a, c, g, or t
  misc_feature (508)..(508): n is a, c, g, or t
  misc_feature (513)..(513): n is a, c, g, or t
  misc_feature (515)..(515): n is a, c, g, or t
  misc_feature (544)..(544): n is a, c, g, or t
  misc_feature (556)..(556): n is a, c, g, or t

SEQ ID NO: 215603 - DNA, 515 bp, Canis familiaris; identical to SEQ ID NO: 5496
  misc_feature (402)..(402): n is a, c, g, or t
  misc_feature (472)..(472): n is a, c, g, or t
  misc_feature (489)..(489): n is a, c, g, or t
  misc_feature (501)..(501): n is a, c, g, or t
  misc_feature (506)..(506): n is a, c, g, or t

SEQ ID NO: 215604 - DNA, 600 bp, Canis familiaris
  misc_feature (421)..(421): n is a, c, g, or t
  misc_feature (453)..(453): n is a, c, g, or t
  misc_feature (501)..(501): n is a, c, g, or t
  misc_feature (524)..(524): n is a, c, g, or t
  misc_feature (528)..(528): n is a, c, g, or t
  misc_feature (530)..(530): n is a, c, g, or t
  misc_feature (557)..(557): n is a, c, g, or t
  misc_feature (568)..(568): n is a, c, g, or t
gagggcctggatcttctttctcctttgcctggccgggagggccttggcagcccctcaacaggaagccctgcctgatgagacagaggtggtagaggaaaccgtggctgaggtggcagagggacctgtgggagccaaccccgtgcaggtggaagtaggagaatttgatgaaggtgctgaggaaactgaagaggaggtggtggctgaaaacccctgccagaaccaccactgcaaacatggcaaagtgtgtgagctggatgagaacaatactcccatgtgtgtgtgccaggaccctaccagctgccctggtcccattggcgactttgagaaggtatgcagcaacgacaacaagacctttgactcttcctgccacttctttgccaccaagtgcaccctggaaggcaccaagaaaggccacaaactncacctggactacattgggccttgcaatacatncccttttgctggacttcgaactgactgaattccttttggcatgcgganttggttaaaaacgtctggtaatntttncnaaaggataggacaacaccttttaccanaacaaaacttnaatgaaaaaatcacaaaacaaaacctgggggt

SEQ ID NO: 215605 - DNA, 600 bp, Canis familiaris
  misc_feature (417)..(417): n is a, c, g, or t
  misc_feature (471)..(471): n is a, c, g, or t
  misc_feature (490)..(490): n is a, c, g, or t
  misc_feature (492)..(492): n is a, c, g, or t
  misc_feature (528)..(528): n is a, c, g, or t
  misc_feature (540)..(540): n is a, c, g, or t
  misc_feature (550)..(550): n is a, c, g, or t
  misc_feature (553)..(553): n is a, c, g, or t
  misc_feature (573)..(573): n is a, c, g, or t
  misc_feature (585)..(585): n is a, c, g, or t
  misc_feature (591)..(591): n is a, c, g, or t
tattctctggacacgagaggaaaattcattcttagtattgcatatagccctgatgggaagtatctggccagtggagccatagatgggatcatcaatatttttgatattgcaactggaaaacttctgcacacgctggaaggccatgctatgcctatccgttccctgacattctccccggattctcagctcctggtcactgcatcagatgatggctacatcaagatctatgatgtacaacatgccaatttggctggcacgctgagtggccatgcatcatgggtgctgaatgttgcattttgtcctgacgacacccactttgtgtccagttcatctgataaaagtgtgaaagtttgggatgttggaacaagaacctgtgttcacaccttcttcgatcaccaagatcaggtctggggagtnaaatacaatggaaatggctcaaaaattgtgtccgtgggcgatgaccaggaaatncacctctattaatgcccgntnaacaccaacttcaaggctgggggcaggtatgaattncgaccttttacntttaaaaaanaanaggttttggaacaaaacttnaaattggaaatnggtttngtcatcctt

SEQ ID NO: 215606 - DNA, 600 bp, Canis familiaris
  misc_feature (450)..(450): n is a, c, g, or t
  misc_feature (463)..(463): n is a, c, g, or t
  misc_feature (494)..(494): n is a, c, g, or t
  misc_feature (507)..(507): n is a, c, g, or t
  misc_feature (530)..(530): n is a, c, g, or t
  misc_feature (573)..(573): n is a, c, g, or t
  misc_feature (590)..(590): n is a, c, g, or t
  misc_feature (594)..(594): n is a, c, g, or t
cctttgtcgccaaagggcgccgcaaagcagaggctgagaataaggcggcagccctggcctgcaagaaattgaagagcctgggcctggtggaccgcaacaacgagccgcttacccatgccatgtataacctggcctccttgcgtgagctgggtgagacccagcgccggccgtgtaccatccaggtgcctgagcccatcctccgaaagatagaaaccttcctgaaccattaccctgtggacagttcatggatctccccagagctccggctgcagagtgatgacatcttgcccttgggcaaggactcggggcccctgagtgaccctattacaggcaagccctacgtgcctctgtcagaagcagaggaagtacgtctgagccagaacttgctggagctgtggcggcggcgagggccagtctggcaggaggttcccagctcctgtggaccacatngggacaacatctnaatggcatcgacagaaccggtggtggtaatntttggggacaccngcttggggaaagacaaacgcatncccagttattgttggaccgtttttgagcaaggcctggcgcccnttcaatgtaattattantaancccgcc

SEQ ID NO: 215607 - DNA, 541 bp, Canis familiaris; identical to SEQ ID NO: 5500
  misc_feature (512)..(512): n is a, c, g, or t

SEQ ID NO: 215608 - DNA, 488 bp, Canis familiaris; identical to SEQ ID NO: 5501
  misc_feature (429)..(429): n is a, c, g, or t
  misc_feature (447)..(447): n is a, c, g, or t
  misc_feature (449)..(449): n is a, c, g, or t
  misc_feature (481)..(481): n is a, c, g, or t

SEQ ID NO: 215609 - DNA, 600 bp, Canis familiaris
  misc_feature (502)..(502): n is a, c, g, or t
  misc_feature (517)..(517): n is a, c, g, or t
  misc_feature (526)..(526): n is a, c, g, or t
  misc_feature (565)..(565): n is a, c, g, or t
  misc_feature (570)..(570): n is a, c, g, or t
  misc_feature (592)..(592): n is a, c, g, or t
attcgaataacatatatattggcattaaactatctgattattagaggtctgattccaaataggacaaaatattcttcttagggcaagaagccaggcaacttacttactggtttaaattcaataaagagcagaaaaattctaaaatcgaatagcaaattcaaacactaaaattaatcctggtgaggccctttgttgcagcatgttgctactatccccacgtgtcatgaacgtttgacaaattgccttagtgacagtaggagctcaaaaaaagagccttatcagacaatataagcctgatataacttctcattataagccctatagaatgtgcaaatgcagaatatcttatacctgaaagtaattttgcctttcttaatatgtttatggcaccaaaattattaggaagatgtgactactatctggaaagtgtaatgaactaaactcactttctttaccccaattttgtgtgtttgcattggtagggtaatactttatagatcanccccaaatacaagtnactttttgnaattcatagttctttgaaaacataaaaaacatttaattnaatgntcaaaacctggggccctcactnttcaatga

SEQ ID NO: 215610 - DNA, 481 bp, Canis familiaris; identical to SEQ ID NO: 5503

SEQ ID NO: 215611 - DNA, 493 bp, Canis familiaris; identical to SEQ ID NO: 5504
  misc_feature (462)..(462): n is a, c, g, or t
  misc_feature (475)..(475): n is a, c, g, or t

SEQ ID NO: 215612 - DNA, 600 bp, Canis familiaris
  misc_feature (317)..(317): n is a, c, g, or t
  misc_feature (452)..(452): n is a, c, g, or t
  misc_feature (505)..(505): n is a, c, g, or t
  misc_feature (527)..(527): n is a, c, g, or t
  misc_feature (546)..(546): n is a, c, g, or t
  misc_feature (554)..(554): n is a, c, g, or t
  misc_feature (571)..(571): n is a, c, g, or t
gagcaggagctcaactctgcaagggagcaggcctctctcctgatccgacaggcactcaccatgttccctggagtcctcctacctttgcttgagtactgcagcgtgcggccagatgccgctgtcgccactcaccgcttctttggaccggatgctgagataagccaaccccctgccctgagccagctggtgagcctgtacctcggaaggtcacacttcctctggaaggagcccgccaccatgagctggctggaggagaacgttcgtgaggttctgcaggcggtggactctggagaccctgcggtggaagcgtgtgagancaaacggaaggtgctctaccagcgtgcgcccagaaatatccaccgccacgtggtcctgtccgaggtcaaggaagctgttgctgcctccccccggatgtgaccacccaatctgtgatgggggtcgacctctgctcnttggaaacatctattctactgagacaaaaaggttgagtcccgtcagccatggnaacaaattgactctttttcggncctgtggctaatacatatnaagggganaggttgaagatgaaggntgggtttaacaaacaaggttgaaggtgtg

SEQ ID NO: 215613 - DNA, 545 bp, Canis familiaris; identical to SEQ ID NO: 5506
  misc_feature (497)..(497): n is a, c, g, or t
  misc_feature (501)..(501): n is a, c, g, or t
  misc_feature (514)..(514): n is a, c, g, or t
  misc_feature (525)..(525): n is a, c, g, or t
  misc_feature (538)..(538): n is a, c, g, or t

SEQ ID NO: 215614 - DNA, 515 bp, Canis familiaris; identical to SEQ ID NO: 5507
  misc_feature (487)..(487): n is a, c, g, or t
  misc_feature (501)..(501): n is a, c, g, or t

SEQ ID NO: 215615 - DNA, 502 bp, Canis familiaris; identical to SEQ ID NO: 5508
  misc_feature (429)..(429): n is a, c, g, or t
  misc_feature (432)..(432): n is a, c, g, or t
  misc_feature (439)..(439): n is a, c, g, or t
  misc_feature (470)..(470): n is a, c, g, or t
  misc_feature (487)..(487): n is a, c, g, or t
  misc_feature (493)..(493): n is a, c, g, or t

SEQ ID NO: 215616 - DNA, 556 bp, Canis familiaris; identical to SEQ ID NO: 5509
  misc_feature (471)..(471): n is a, c, g, or t
  misc_feature (497)..(497): n is a, c, g, or t
  misc_feature (544)..(544): n is a, c, g, or t

SEQ ID NO: 215617 - DNA, 494 bp, Canis familiaris; identical to SEQ ID NO: 5510
  misc_feature (381)..(381): n is a, c, g, or t
  misc_feature (394)..(394): n is a, c, g, or t
  misc_feature (419)..(419): n is a, c, g, or t
  misc_feature (452)..(452): n is a, c, g, or t
  misc_feature (465)..(465): n is a, c, g, or t
  misc_feature (478)..(478): n is a, c, g, or t
  misc_feature (481)..(481): n is a, c, g, or t

SEQ ID NO: 215618 - DNA, 535 bp, Canis familiaris; identical to SEQ ID NO: 5511
  misc_feature (476)..(476): n is a, c, g, or t
  misc_feature (493)..(493): n is a, c, g, or t

SEQ ID NO: 215619 - DNA, 600 bp, Canis familiaris
  misc_feature (436)..(436): n is a, c, g, or t
  misc_feature (500)..(500): n is a, c, g, or t
  misc_feature (521)..(521): n is a, c, g, or t
  misc_feature (526)..(526): n is a, c, g, or t
  misc_feature (542)..(542): n is a, c, g, or t
  misc_feature (574)..(574): n is a, c, g, or t
  misc_feature (583)..(583): n is a, c, g, or t
  misc_feature (592)..(592): n is a, c, g, or t
ggtcaggagatagttggatgatatagtcaaagtgctgaactagtaaccaagaattccatatccaccttggaattttaaagacattggcaaacaaaaaacagaattcattgcttttagagccctgtaagaaaacaaggaaaggaaacacttgaggctgaaagcaagtgacttcagataaatccacatgaaaacaaagaacactagtgaaggtaggtaagcagttataaaatatagtactttttctcttaactgatttaaaaagcaattaattacatattttacacactatattgatggcatataacatatataatgtgtaatatatttgccaataatagcacaaagaagatagatgggaagaaagttgggggcttagaaaatggcacaaggtagcaactcaaatccacaagaaccaattaaaaagaacccaaaatgnttaataagaatggtggtataacaaacacttatttttttacaacacttagacatatattttgttnttctttcactttttaaagatntaaanggaattaaaaataatntgattatggtgattggatatataaaagggctnttttttctntgatatatnttcaaaag

SEQ ID NO: 215620 - DNA, 598 bp, Canis familiaris; identical to SEQ ID NO: 5513
  misc_feature (440)..(440): n is a, c, g, or t
  misc_feature (462)..(462): n is a, c, g, or t
  misc_feature (495)..(495): n is a, c, g, or t
  misc_feature (502)..(502): n is a, c, g, or t
  misc_feature (515)..(515): n is a, c, g, or t
  misc_feature (525)..(525): n is a, c, g, or t
  misc_feature (549)..(549): n is a, c, g, or t
  misc_feature (575)..(575): n is a, c, g, or t
  misc_feature (581)..(581): n is a, c, g, or t

SEQ ID NO: 215621 - DNA, 521 bp, Canis familiaris; identical to SEQ ID NO: 5514
  misc_feature (52)..(52): n is a, c, g, or t
  misc_feature (119)..(119): n is a, c, g, or t
  misc_feature (133)..(133): n is a, c, g, or t
  misc_feature (170)..(170): n is a, c, g, or t
  misc_feature (206)..(206): n is a, c, g, or t
  misc_feature (209)..(209): n is a, c, g, or t
  misc_feature (232)..(232): n is a, c, g, or t
  misc_feature (265)..(265): n is a, c, g, or t
  misc_feature (318)..(318): n is a, c, g, or t
  misc_feature (328)..(328): n is a, c, g, or t
  misc_feature (341)..(341): n is a, c, g, or t
  misc_feature (372)..(372): n is a, c, g, or t
  misc_feature (404)..(404): n is a, c, g, or t
  misc_feature (410)..(410): n is a, c, g, or t
  misc_feature (455)..(455): n is a, c, g, or t
  misc_feature (473)..(473): n is a, c, g, or t
  misc_feature (497)..(497): n is a, c, g, or t
  misc_feature (511)..(511): n is a, c, g, or t

SEQ ID NO: 215622 - DNA, 337 bp, Canis familiaris; identical to SEQ ID NO: 5515

SEQ ID NO: 215623 - DNA, 322 bp, Canis familiaris; identical to SEQ ID NO: 5516

SEQ ID NO: 215624 - DNA, 600 bp, Canis familiaris
  misc_feature (464)..(464): n is a, c, g, or t
  misc_feature (504)..(504): n is a, c, g, or t
  misc_feature (555)..(555): n is a, c, g, or t
  misc_feature (562)..(562): n is a, c, g, or t
  misc_feature (577)..(577): n is a, c, g, or t
aggtattcagctacgcaaagtagaagagcagcgtgaacaggaagctaaacacgaacgcattgaaaatgatgttgccaccatcctgtctcgccgtattgctgtggaatatagtgattcagaagatgattcagaatttgatgaagtagattggttggagtaagaaaaatgcattgataaatattacaaaactgaatgcagacgtcctttgtggtgcttgttctttgaaaatgtttggtcattccagtgttttgctttcttttccttatggtaaataacccttttcctccataatttttgatttctaagaaaatattagcatacatttcaaactaaatgttttacagtggcttatcttttttattttttccctgaaaagataatttggtcaaataaaccactaagtattaagcatggcaggccgttggtagagtagcaaattcaagtttttgatatatcttaattgngcacttgtgaatttactttaaagaaagcaactgagattgnaatcttgagggcgctgttctattaatgagcctattccttttctgatgtttnaaaaaanaaaactgccttgttnttgaatccctagaaaggcattag

SEQ ID NO: 215625 - DNA, 456 bp, Canis familiaris; identical to SEQ ID NO: 5518

SEQ ID NO: 215626 - DNA, 534 bp, Canis familiaris; identical to SEQ ID NO: 5519
  misc_feature (459)..(459): n is a, c, g, or t
  misc_feature (463)..(463): n is a, c, g, or t
  misc_feature (498)..(498): n is a, c, g, or t
  misc_feature (512)..(512): n is a, c, g, or t
  misc_feature (516)..(516): n is a, c, g, or t
  misc_feature (528)..(528): n is a, c, g, or t

SEQ ID NO: 215627 - DNA, 600 bp, Canis familiaris
  misc_feature (439)..(439): n is a, c, g, or t
  misc_feature (467)..(467): n is a, c, g, or t
  misc_feature (480)..(480): n is a, c, g, or t
  misc_feature (495)..(495): n is a, c, g, or t
  misc_feature (508)..(508): n is a, c, g, or t
  misc_feature (515)..(515): n is a, c, g, or t
  misc_feature (568)..(568): n is a, c, g, or t
  misc_feature (598)..(598): n is a, c, g, or t
gttagtgaaactccagagactcacaagacaatctcccgccaggaaaaagaatatattctttcatcattaaaaaatcagctttcatcacagaagtcagtgccatggatacccatgctaaaatcactgccgctttgggctattgtagtagcacatttttcttacaactggactttttacactttattgacgttattgcctacttacatgaaggagatcctaaggttcaatgttcaagagaatgggcttctatctgcactgccttactttggctgttggttatgtatgatcttgtctggtcaagctgctgacaatttaagggcaaaatggaatttttcaacaatatgtgtccgaagagtttttagcctaataggaatgattggacctgcggtattcctggtagccgctggatttataggttgtgactattcattggccgtgnggtcttaaccatatcacaacactgggangcttttgctcttntggattaacatcaancatctggatatgntccttcnatgctggatcctctgggcatcacaaatcattgcacttttcaggaatggtgggncttcattgttaaagttgaccctgtacactnta

SEQ ID NO: 215628 - DNA, 600 bp, Canis familiaris
  misc_feature (342)..(342): n is a, c, g, or t
  misc_feature (412)..(412): n is a, c, g, or t
  misc_feature (434)..(434): n is a, c, g, or t
  misc_feature (449)..(449): n is a, c, g, or t
  misc_feature (508)..(508): n is a, c, g, or t
  misc_feature (533)..(533): n is a, c, g, or t
  misc_feature (562)..(562): n is a, c, g, or t
  misc_feature (564)..(564): n is a, c, g, or t
  misc_feature (570)..(570): n is a, c, g, or t
gggtattcattcagtaactgtgttttgagtttatactgtgtgctaggccttgttctaggtactgtggatacagcactggcaaaaacattaaaacaaagcggaacaacaacaaaaatccaccgccaggggtttgatggggagcttgtctgcacagctcctaaaggacagagctggggtttggactttgagagcttgacctcacagcccatgtgctgcaccactgagctgtgcagccgtcccgtttgtttttatgtccatagtttccctcttctcttaccaactcttgggaacttaccatctgtctcttcagcatctcaacacattttctcacctggttcttgnctttccacattcatcatttatatttacctttcatgttcacaatcatggacaggggaagctttcattccgngtctttaggacaagttaccttntggtggttttgaggnatgtcacaccatttttatttttatttccttttttccctttcaccatcttttttaacctnttttcttttgcctttggggccctantccctgaccacctccttctgggccaggtntntgttanacccaaggcaaagaatgttgggaaaaagct

SEQ ID NO: 215629 - DNA, 549 bp, Canis familiaris; identical to SEQ ID NO: 5522
  misc_feature (476)..(476): n is a, c, g, or t
  misc_feature (500)..(500): n is a, c, g, or t
  misc_feature (503)..(503): n is a, c, g, or t
  misc_feature (517)..(517): n is a, c, g, or t
  misc_feature (533)..(533): n is a, c, g, or t

SEQ ID NO: 215630 - DNA, 600 bp, Canis familiaris
  misc_feature (419)..(419): n is a, c, g, or t
  misc_feature (447)..(447): n is a, c, g, or t
  misc_feature (465)..(465): n is a, c, g, or t
  misc_feature (474)..(474): n is a, c, g, or t
atttggaagtagtgcttctgaaccccaacctgcacctcaggctgcttctagttcatcagcatcggcagacctactagctggatttgggggttcttttatggccccttctccatcaccagtgactccagctcagaataacctgctacagcccaattttgaggcagcttttggaacaacgccttcaacttctagcagcagctcctttgatccatcagtgtttgatggtttaggcgatctactgatgccaaccatggcaccagccgggcagcctgcacccatttcaatggttccacctagtccagcaatggcagcaagcaaagcccttgggagtgaccttgactcatctcttgccagcttaataggcaatcttggaatttctggtaccacatccaaaaagggagatcttcagtggaatgcangagaagaaaaagttgactggtggagccnactggcagccgaaagagnccccgcaanctggtcagcaagtgtccaccaaggcacctttgcaaggagtggacctccaccagttcggttctctgtggcggggcccatttgtggaaagctggacaggattggaagctctgtggacggctgccataa

SEQ ID NO: 215631 - DNA, 470 bp, Canis familiaris; identical to SEQ ID NO: 5524
  misc_feature (407)..(407): n is a, c, g, or t
  misc_feature (444)..(444): n is a, c, g, or t

SEQ ID NO: 215632 - DNA, 567 bp, Canis familiaris; identical to SEQ ID NO: 5525
  misc_feature (181)..(181): n is a, c, g, or t
  misc_feature (466)..(466): n is a, c, g, or t
  misc_feature (468)..(468): n is a, c, g, or t
  misc_feature (473)..(473): n is a, c, g, or t
  misc_feature (506)..(506): n is a, c, g, or t
  misc_feature (531)..(531): n is a, c, g, or t
  misc_feature (539)..(539): n is a, c, g, or t

SEQ ID NO: 215633 - DNA, 595 bp, Canis familiaris; identical to SEQ ID NO: 5526
  misc_feature (469)..(469): n is a, c, g, or t
  misc_feature (491)..(491): n is a, c, g, or t
  misc_feature (523)..(523): n is a, c, g, or t
  misc_feature (536)..(536): n is a, c, g, or t
  misc_feature (563)..(563): n is a, c, g, or t
  misc_feature (567)..(567): n is a, c, g, or t
  misc_feature (587)..(587): n is a, c, g, or t

SEQ ID NO: 215634 - DNA, 484 bp, Canis familiaris; identical to SEQ ID NO: 5527

SEQ ID NO: 215635 - DNA, 600 bp, Canis familiaris
  misc_feature (490)..(490): n is a, c, g, or t
  misc_feature (549)..(549): n is a, c, g, or t
  misc_feature (564)..(564): n is a, c, g, or t
aagaaaggttgctgggatccttgcctttgtgaaaatgtgctctacacagcccaacttgctgcctggaggagatggagctgctgcttccaaggagtcttgcagaattggataagaggcatattacagggggccattaaagactgaaatcctgaagagctctcatggaatcctttgtaccataagggaagagactcagatcagatttgatttgatatagaaaaaataatgaaccgtttttactgtttctgagtgttgtaactaaataaagttcatatggactccagcaggaagtgaataaataatagagatttcaataatgaattgttcatatacacctaaatcttctattgcacttgcttgagatggagaagagaaaaggcatttcccttttccctgggtgtctgttcctttttgacaagggaagtgaaaagaaatactatagattctttggttgctttaaggaagaacattcttaaccctacaaatggtnttaaagtgcatgcttgtattatccaatggtattataaatgtttaggcaaccccatggcncaccggtttgcgccnctccacctgggggtgacctgggacctgggtccatcc

SEQ ID NO: 215636 - DNA, 600 bp, Canis familiaris
  misc_feature (457)..(457): n is a, c, g, or t
  misc_feature (495)..(495): n is a, c, g, or t
  misc_feature (516)..(517): n is a, c, g, or t
  misc_feature (522)..(522): n is a, c, g, or t
  misc_feature (564)..(564): n is a, c, g, or t
  misc_feature (591)..(591): n is a, c, g, or t
  misc_feature (594)..(594): n is a, c, g, or t
aacatctaattacttataattatatgctacatacatactaatatataaaattcaagggcaaatctgcatgatttcacacttcaaaaagagctacattgggacggagcagaaagacttcaagttttttcattcttctcccctcccagcccaccacgcaaaggctacaggagtacaatagttcagaccaaggacagagaagtacaaatttaaatgattaatcttcatttttcaaatgcaaactcccactcaccagtagtctcttcaagaagttctataaacttcaaatccacactcaaccctggatagaaggtcaacttttcaaatggcctcaaaataaggactgcaccaccaatagaacatttgttccttgaaggttctacatgttatgagatacgagaagggtgacacagtcaagggtagcacagatctgctccttaaacaagggtttggttttgtncagttaacttcaaattctttcctaggttctgaatggcnaagaaggcaaacttctacatnnttttnttagctggtacgtgcactaactgagatttttctagatctcangggggcactggaattgggcctggcaanggnaaaaaa

SEQ ID NO: 215637 - DNA, 506 bp, Canis familiaris; identical to SEQ ID NO: 5530
  misc_feature (198)..(198): n is a, c, g, or t
  misc_feature (297)..(297): n is a, c, g, or t
  misc_feature (358)..(358): n is a, c, g, or t
  misc_feature (393)..(393): n is a, c, g, or t
  misc_feature (449)..(449): n is a, c, g, or t
  misc_feature (458)..(458): n is a, c, g, or t
  misc_feature (477)..(477): n is a, c, g, or t
  misc_feature (483)..(483): n is a, c, g, or t

SEQ ID NO: 215638 - DNA, 556 bp, Canis familiaris; identical to SEQ ID NO: 5531
  misc_feature (448)..(448): n is a, c, g, or t
  misc_feature (466)..(466): n is a, c, g, or t
  misc_feature (487)..(487): n is a, c, g, or t
  misc_feature (494)..(494): n is a, c, g, or t
  misc_feature (519)..(519): n is a, c, g, or t
  misc_feature (521)..(521): n is a, c, g, or t
  misc_feature (540)..(540): n is a, c, g, or t

SEQ ID NO: 215639 - DNA, 366 bp, Canis familiaris; identical to SEQ ID NO: 5532
  misc_feature (4)..(4): n is a, c, g, or t
  misc_feature (27)..(27): n is a, c, g, or t
  misc_feature (31)..(31): n is a, c, g, or t
  misc_feature (61)..(61): n is a, c, g, or t
  misc_feature (93)..(93): n is a, c, g, or t
  misc_feature (104)..(104): n is a, c, g, or t
  misc_feature (153)..(153): n is a, c, g, or t
  misc_feature (188)..(188): n is a, c, g, or t
  misc_feature (199)..(199): n is a, c, g, or t
  misc_feature (254)..(254): n is a, c, g, or t
  misc_feature (273)..(273): n is a, c, g, or t
  misc_feature (282)..(282): n is a, c, g, or t
  misc_feature (291)..(291): n is a, c, g, or t
  misc_feature (325)..(325): n is a, c, g, or t
  misc_feature (330)..(330): n is a, c, g, or t
  misc_feature (341)..(341): n is a, c, g, or t

SEQ ID NO: 215640 - DNA, 600 bp, Canis familiaris
  misc_feature (526)..(526): n is a, c, g, or t
  misc_feature (545)..(545): n is a, c, g, or t
  misc_feature (551)..(551): n is a, c, g, or t
  misc_feature (562)..(562): n is a, c, g, or t
ccctcctttgcttggtagattggactcagagagacaaaaagttagtctacttatgtgcatgctagcatcatgtccttaggtaaaggtctgcctctctggttgccaaatactgatcatgatgctcatgacttagaggttctgaagaaccttgtcccccttggtttcctgagtcaaggttaactaactgccatgcaggcaaaaccctacaaaagcacagttctggtagtaaactgcatagttgtccatagaaagagcactagaggcacaggaatggtcagtgtacagctttggggttgcagaaaggcaactgatgaagcacagatcccacatatgtgaagggagtatgacctctacctaataggctttgtgtgcatattttgagtgactgaagatgagatcaactaatgcaatatacacttgcctcttagaacacacattctgtctaattatcactaaatggaatgctgtggcatggatagtacctgtacccctttctctttgcaaggacagaggaaatgaccatgtncttcggggatcctgagtgncccttnttttacaaaanaggtgaacctattgatcctgtgagggacaaaccattaa

SEQ ID NO: 215641 - DNA, 600 bp, Canis familiaris
  misc_feature (352)..(352): n is a, c, g, or t
  misc_feature (412)..(412): n is a, c, g, or t
  misc_feature (463)..(463): n is a, c, g, or t
  misc_feature (465)..(466): n is a, c, g, or t
  misc_feature (481)..(481): n is a, c, g, or t
  misc_feature (500)..(500): n is a, c, g, or t
  misc_feature (513)..(513): n is a, c, g, or t
  misc_feature (528)..(528): n is a, c, g, or t
  misc_feature (570)..(570): n is a, c, g, or t
  misc_feature (585)..(585): n is a, c, g, or t
  misc_feature (587)..(587): n is a, c, g, or t
ggccagcgtggatgtggcggacctgatcggcctcaaccttgtcatgtcccggaacgcaggcaagggggagtacaagatcatggttgctgccctgggctgggccaccgccgagctcattatgtcccgctgcatccctctctgggttggagcccggggcattgagtttgactggaagtacatccagatgagcattgactccaacatcagtctggtccattacatcgtcgcatctgcccaggtctggatgataacacgctacgacctgtaccacacttttcggccagcggtcctcctcctgatgttcctcagcgtctacaaggcctttgtcatggagaccttcgtccacctctgntccctggcagctggacaagcactgctggcccggcaagtggtgacagggcttgttggcctnaacaccctggccttttacgtaagccgtcgtaaacggcactctaaggttggngnnccccaaaaataaaanaccctttccttgctccggnttaaggaaaaaanaattttggaacgttnaaaaaaaaaaaaaagggggggcgttttaaggatcaagttacntcccgggatggaagnanaattttttaaggg

SEQ ID NO: 215642 - DNA, 589 bp, Canis familiaris; identical to SEQ ID NO: 5535
  misc_feature (484)..(484): n is a, c, g, or t
  misc_feature (524)..(524): n is a, c, g, or t
  misc_feature (531)..(531): n is a, c, g, or t
  misc_feature (575)..(575): n is a, c, g, or t
  misc_feature (579)..(579): n is a, c, g, or t

SEQ ID NO: 215643 - DNA, 542 bp, Canis familiaris; identical to SEQ ID NO: 5536
  misc_feature (490)..(491): n is a, c, g, or t
  misc_feature (506)..(506): n is a, c, g, or t
  misc_feature (516)..(516): n is a, c, g, or t

SEQ ID NO: 215644 - DNA, 600 bp, Canis familiaris
  misc_feature (329)..(329): n is a, c, g, or t
  misc_feature (460)..(460): n is a, c, g, or t
  misc_feature (474)..(474): n is a, c, g, or t
  misc_feature (519)..(519): n is a, c, g, or t
  misc_feature (527)..(527): n is a, c, g, or t
  misc_feature (550)..(550): n is a, c, g, or t
  misc_feature (562)..(562): n is a, c, g, or t
tcccagtggtgaagaaggaaagagaggccccaatggtgaagctggatctgctgggccctctggacctcctgggctgagaggaagtcctggttctcgtggtcttcctggagctgatggccgagctggtgtcatgggtcctcccggccctcggggtgccaccggccctgctggtgtccgcggtcccaatggagattctggtcgccctggagagcctggcctcatgggaccccgaggttttcctggtgcccctggtaatgttggcccagctggtaaagaaggtcccatgggtcttcctggtattgatggcaggcctggaccaattggcccancgggagcaagaggagagcccggcaacatcggattcctggacccaaaggccccactggtgatcctggcaaaaatggtgataaaggtcatgctggtctttgctggtgctcggggtgcttcaagtcctgatggnaacaatggtgcttnaaggaccttctggacacaaggtgtcaaagtggaaaaggtgaacanggtccttnttggtcctcaagctttcaaggtnttgctggccccnaagtccagttgtgaaattggcaaacaagaaaaaggggt

SEQ ID NO: 215645 - DNA, 525 bp, Canis familiaris; identical to SEQ ID NO: 5538
  misc_feature (395)..(395): n is a, c, g, or t
  misc_feature (508)..(508): n is a, c, g, or t
  misc_feature (520)..(520): n is a, c, g, or t

SEQ ID NO: 215646 - DNA, 600 bp, Canis familiaris
  misc_feature (505)..(505): n is a, c, g, or t
  misc_feature (517)..(517): n is a, c, g, or t
  misc_feature (532)..(532): n is a, c, g, or t
  misc_feature (562)..(562): n is a, c, g, or t
  misc_feature (578)..(578): n is a, c, g, or t
tgcaaagaatactcattgcagcagccttcctcattatcagaaattaaagaaatttctgaataaattggcagaagaacgcaggcagaagaaggaagcttaagatgtgcaagaagcttaacgatttcaaagaaaataatggttctttgtttttaatgttaaccttttttaaatacaatactgatagttagaagaaaactattgtactcttttgttttagtggaaaaataatagatgtctgttcatgtgttaagtgttatagcaaaaatacatatacggttaagttaatgaagaattttgttttatcagaaatggtaacagaccgaagtactttgtagagactgactcgtaagctacttaaagacaacttgcaccaagaaaaaagatgtagaatcattcagagaaatgaaatttagttccaagcttcaaagaaatgtcaaaacttttgattccattcaataaaagaacaaaacccattggatttttattactttcatctggaacattncacattttaatntgagccttgcagacntttcttttggggttggaacttttttggtgntttttatttggggatntccttatttgaaatggcaatta

SEQ ID NO: 215647 - DNA, 534 bp, Canis familiaris; identical to SEQ ID NO: 5540
  misc_feature (433)..(433): n is a, c, g, or t
  misc_feature (441)..(441): n is a, c, g, or t
  misc_feature (502)..(502): n is a, c, g, or t
  misc_feature (519)..(519): n is a, c, g, or t

SEQ ID NO: 215648 - DNA, 570 bp, Canis familiaris; identical to SEQ ID NO: 5541
  misc_feature (404)..(404): n is a, c, g, or t
  misc_feature (508)..(508): n is a, c, g, or t
  misc_feature (520)..(520): n is a, c, g, or t
  misc_feature (537)..(537): n is a, c, g, or t

SEQ ID NO: 215649 - DNA, 426 bp, Canis familiaris; identical to SEQ ID NO: 5542
  misc_feature (419)..(419): n is a, c, g, or t

SEQ ID NO: 215650 - DNA, 600 bp, Canis familiaris
  misc_feature (440)..(440): n is a, c, g, or t
  misc_feature (444)..(444): n is a, c, g, or t
  misc_feature (451)..(451): n is a, c, g, or t
  misc_feature (469)..(469): n is a, c, g, or t
  misc_feature (483)..(483): n is a, c, g, or t
  misc_feature (504)..(504): n is a, c, g, or t
  misc_feature (532)..(532): n is a, c, g, or t
  misc_feature (539)..(539): n is a, c, g, or t
  misc_feature (554)..(554): n is a, c, g, or t
  misc_feature (577)..(577): n is a, c, g, or t
acttcccccgtggaagcaaagcctcagcccttagtatcaggtgctggtctctttccctcctacccactccaggggcctaaggcacttcagcagagttccagagctcttcaaaactcagtttgaaaccactttatcagacattccctggtgttcctttaggccagtactctgtaaatctggatgtcatttgcatttatctaagatttattttgtgatgtactttaatatcagtaagtttctttaaatatatattagctgcatttttttctgatgactaaacaagaagcatattaaattgtcatgaactcaggatacttctaaatgtttgctgctacaatgaaatttgccattggtctttaggtttttttagtattattgggggggggcggataatgaaacatcaaacatgataaatgatcctgtatgtgcccatgcttcancttnaagactnggggttctgaaaacaacntttccaaattgganctgaaggaaatttggctactnaccagtctactatggttttatcctgcanaaaactnaagatgtccatcaanaaacataaaatttccttggctgngatgattgaaccacctaaatttt

SEQ ID NO: 215651 - DNA, 600 bp, Canis familiaris
  misc_feature (391)..(391): n is a, c, g, or t
  misc_feature (413)..(413): n is a, c, g, or t
  misc_feature (424)..(424): n is a, c, g, or t
  misc_feature (487)..(487): n is a, c, g, or t
  misc_feature (533)..(533): n is a, c, g, or t
  misc_feature (535)..(535): n is a, c, g, or t
  misc_feature (554)..(554): n is a, c, g, or t
cggggtgccctgtacatgtatcccttcaaatctgtatttttgtatcatttgggtaaatacctactaggcaattgctggatcatagggttccatttcttaatttaggacattaaatatgaatagaagtggttttcttggtagaaagaaaatattctctgagttggagaagtctttacaattaagtcttaatgaccttttttattacaagtggaattttcctctccttgaagcttattgtcacatgtatctttaatgccagctttgcttctagaattgcttgaagtcctctctttctggtgggagtgcatcactcacttgcaactccatttattaggctgtgccaaaaaagctgtgccctaacctgtgtgaggtgacctcccatgcacacatnctacttatgtaagatgattctntagaatgggtnctgggaaaagactttcacaaatttttgacaggctgtaaataaccaccaatatacaatctttgntcttcattgctgggcacaagaatctatgccgctagacattatgtgngntgaaatgaactcatggtgnaacctttttggttatttacgggaaagacttaactttactttgcttt

SEQ ID NO: 215652 - DNA, 600 bp, Canis familiaris
  misc_feature (204)..(204): n is a, c, g, or t
  misc_feature (333)..(333): n is a, c, g, or t
  misc_feature (373)..(373): n is a, c, g, or t
  misc_feature (388)..(388): n is a, c, g, or t
  misc_feature (393)..(393): n is a, c, g, or t
  misc_feature (426)..(426): n is a, c, g, or t
  misc_feature (437)..(437): n is a, c, g, or t
  misc_feature (463)..(463): n is a, c, g, or t
  misc_feature (490)..(490): n is a, c, g, or t
  misc_feature (494)..(494): n is a, c, g, or t
  misc_feature (500)..(500): n is a, c, g, or t
  misc_feature (525)..(525): n is a, c, g, or t
  misc_feature (531)..(531): n is a, c, g, or t
  misc_feature (542)..(542): n is a, c, g, or t
  misc_feature (561)..(561): n is a, c, g, or t
  misc_feature (566)..(566): n is a, c, g, or t
  misc_feature (573)..(573): n is a, c, g, or t
acaatctacaccattgatggactcaagaagatttccagcctggaccaactggtggaaggagagagctatgtgtgtggctcaatagagcccttcaagaaactggagtacaccaagaatgtgaatcccaactggtcggtgaatgtcaagaccacctctgcttcccgggccgtgtcctcactggctactgccaaagggagcccttcngaggtgcgggagaataaggatttcattcggcccaagctggtcaccattatcagaaagtggggtgaaagccaccaaaagctgtcaaggattcttgttgaacaagaaaacccgcacattccttttgagcanggtctcacttgacataactgatgcgatcaaactggactcnggaagtggtaaacgnctgtntccctaaatgggaaacaagtgatgtgccttcangacttttttgngacgatgacattttattgatgtgggncggaaaaattccgtaccaggatgattnttgntaaatnaaagtggtaaggaaaaaaaaagttnaaaccnggggaaattgnggagttttcaaatagttgnccagncaaaatntttaaccccaagttccaataagttaga

SEQ ID NO: 215653 - DNA, 520 bp, Canis familiaris; identical to SEQ ID NO: 5546
  misc_feature (441)..(441): n is a, c, g, or t
  misc_feature (446)..(446): n is a, c, g, or t
  misc_feature (459)..(459): n is a, c, g, or t
  misc_feature (469)..(469): n is a, c, g, or t
  misc_feature (482)..(482): n is a, c, g, or t
  misc_feature (489)..(489): n is a, c, g, or t
  misc_feature (513)..(513): n is a, c, g, or t

SEQ ID NO: 215654 - DNA, 343 bp, Canis familiaris; identical to SEQ ID NO: 5547
  misc_feature (291)..(291): n is a, c, g, or t

SEQ ID NO: 215655 - DNA, 493 bp, Canis familiaris; identical to SEQ ID NO: 5548
  misc_feature (449)..(449): n is a, c, g, or t

SEQ ID NO: 215656 - DNA, 594 bp, Canis familiaris; identical to SEQ ID NO: 5549
  misc_feature (277)..(277): n is a, c, g, or t
  misc_feature (338)..(338): n is a, c, g, or t
  misc_feature (381)..(381): n is a, c, g, or t
  misc_feature (400)..(400): n is a, c, g, or t
  misc_feature (462)..(462): n is a, c, g, or t
  misc_feature (468)..(468): n is a, c, g, or t
  misc_feature (477)..(477): n is a, c, g, or t
  misc_feature (488)..(488): n is a, c, g, or t
  misc_feature (509)..(509): n is a, c, g, or t
  misc_feature (588)..(588): n is a, c, g, or t
  misc_feature (590)..(590): n is a, c, g, or t

SEQ ID NO: 215657 - DNA, 521 bp, Canis familiaris; identical to SEQ ID NO: 5550
  misc_feature (471)..(471): n is a, c, g, or t
  misc_feature (500)..(500): n is a, c, g, or t
  misc_feature (514)..(514): n is a, c, g, or t

SEQ ID NO: 215658 - DNA, 471 bp, Canis familiaris; identical to SEQ ID NO: 5551
  misc_feature (440)..(440): n is a, c, g, or t
  misc_feature (457)..(457): n is a, c, g, or t

SEQ ID NO: 215659 - DNA, 464 bp, Canis familiaris; identical to SEQ ID NO: 5552

SEQ ID NO: 215660 - DNA, 465 bp, Canis familiaris; identical to SEQ ID NO: 5553
  misc_feature (165)..(165): n is a, c, g, or t
  misc_feature (293)..(293): n is a, c, g, or t
  misc_feature (390)..(390): n is a, c, g, or t
  misc_feature (392)..(392): n is a, c, g, or t

SEQ ID NO: 215661 - DNA, 470 bp, Canis familiaris; identical to SEQ ID NO: 5554
  misc_feature (97)..(97): n is a, c, g, or t
  misc_feature (105)..(105): n is a, c, g, or t
  misc_feature (124)..(124): n is a, c, g, or t
  misc_feature (126)..(126): n is a, c, g, or t
  misc_feature (163)..(163): n is a, c, g, or t
  misc_feature (197)..(197): n is a, c, g, or t
  misc_feature (276)..(276): n is a, c, g, or t
  misc_feature (302)..(302): n is a, c, g, or t
  misc_feature (356)..(356): n is a, c, g, or t
  misc_feature (365)..(365): n is a, c, g, or t
  misc_feature (384)..(384): n is a, c, g, or t
  misc_feature (398)..(398): n is a, c, g, or t
  misc_feature (408)..(408): n is a, c, g, or t
  misc_feature (433)..(433): n is a, c, g, or t
  misc_feature (439)..(439): n is a, c, g, or t
  misc_feature (446)..(446): n is a, c, g, or t
  misc_feature (467)..(467): n is a, c, g, or t

SEQ ID NO: 215662 - DNA, 410 bp, Canis familiaris; identical to SEQ ID NO: 5555

SEQ ID NO: 215663 - DNA, 600 bp, Canis familiaris
  misc_feature (295)..(295): n is a, c, g, or t
  misc_feature (301)..(301): n is a, c, g, or t
  misc_feature (354)..(354): n is a, c, g, or t
  misc_feature (369)..(369): n is a, c, g, or t
  misc_feature (387)..(387): n is a, c, g, or t
  misc_feature (396)..(396): n is a, c, g, or t
  misc_feature (462)..(462): n is a, c, g, or t
  misc_feature (468)..(468): n is a, c, g, or t
  misc_feature (524)..(524): n is a, c, g, or t
  misc_feature (536)..(536): n is a, c, g, or t
  misc_feature (555)..(555): n is a, c, g, or t
  misc_feature (570)..(570): n is a, c, g, or t
  misc_feature (590)..(590): n is a, c, g, or t
  misc_feature (592)..(592): n is a, c, g, or t
gctgccctgtgtgggcgttcagcacatggtgactttgtggacattccgcaaacaagtcagcaatcgatgatacgggtttcctggtgccgcgaccacctcgaacacagactggaaggcccggcggtccagctcctcctctatctggtgtctgtaaaagtccgtggccaccaggcagaagaggttaacgtcacttgttccagcttgcccatcctgctgataacgtggggaaggactgccgagacccacgggctggtggaaagcactgacaaaaaaacaagaagaggcttcacacggncatggncactggcgttctttgtgtgaaagttggacaaagacagcattgacccaatcttnggaccattggacgantggccggtgctttgcaanagtcttggnaaaacctttatataccaacggtgggccaatgaacttgtggggtaccggcttgttgggttggacaanaaaatnttcaatgacttttgttatgacgtcttgggggggggaagaagtattttaaaaattgnggaaggatccgngccaccattttgggtttanaaggggaaccctttnttaccttttaaaaagtaaanancaccttca

SEQ ID NO: 215664 - DNA, 320 bp, Canis familiaris; identical to SEQ ID NO: 5557
  misc_feature (212)..(212): n is a, c, g, or t
  misc_feature (276)..(276): n is a, c, g, or t
  misc_feature (301)..(301): n is a, c, g, or t
  misc_feature (309)..(309): n is a, c, g, or t

SEQ ID NO: 215665 - DNA, 480 bp, Canis familiaris; identical to SEQ ID NO: 5558
  misc_feature (448)..(448): n is a, c, g, or t
  misc_feature (451)..(451): n is a, c, g, or t

SEQ ID NO: 215666 - DNA, 366 bp, Canis familiaris; identical to SEQ ID NO: 5559
  misc_feature (123)..(123): n is a, c, g, or t
  misc_feature (327)..(327): n is a, c, g, or t
  misc_feature (346)..(346): n is a, c, g, or t
  misc_feature (357)..(357): n is a, c, g, or t

SEQ ID NO: 215667 - DNA, 583 bp, Canis familiaris; identical to SEQ ID NO: 5560
  misc_feature (400)..(400): n is a, c, g, or t
  misc_feature (459)..(459): n is a, c, g, or t
  misc_feature (474)..(474): n is a, c, g, or t
  misc_feature (510)..(510): n is a, c, g, or t
  misc_feature (515)..(515): n is a, c, g, or t
  misc_feature (540)..(540): n is a, c, g, or t
  misc_feature (558)..(558): n is a, c, g, or t

SEQ ID NO: 215668 - DNA, 313 bp, Canis familiaris; identical to SEQ ID NO: 5561

SEQ ID NO: 215669 - DNA, 600 bp, Canis familiaris
  misc_feature (457)..(457): n is a, c, g, or t
  misc_feature (461)..(461): n is a, c, g, or t
  misc_feature (489)..(489): n is a, c, g, or t
  misc_feature (492)..(492): n is a, c, g, or t
  misc_feature (511)..(511): n is a, c, g, or t
  misc_feature (528)..(528): n is a, c, g, or t
  misc_feature (542)..(542): n is a, c, g, or t
  misc_feature (570)..(570): n is a, c, g, or t
  misc_feature (581)..(581): n is a, c, g, or t
caatcttacgacctcaagatcatgacttgagctgaaatcaagagtcaggtgcttatcggactgagccccctagacacccctactagaaatagattccaagaaacatttctttcagaaaggtctgttactgtgtagcatacgttggcaaacttcttgaataaagggatggattgtaaatatgtcaggctttgtgagctgatgtagcagccagagacaagcatatgtgagcgggtgtggttgggtcccagggaaactggacttgggaaagtgcagtagccccacttccacatgtggaatggatatggttcagggtcatatttccccaaggatggatgcaggaggactgtagaagtccagagggtgttttggtttggtttggtttgtttttttgccatgtacttggatggtgcaatgctatcaaattgattcaactgctggacaagttgtgtaaagatgntgangtgtaccaactagtgaatagggcttganaanatcaggcatttggaaaaanaaaaggttaggttgatncccccccaggaatnatgaaacatcaacaattcaccaaacaanaagtttatggntcacacaactagtttggaa

SEQ ID NO: 215670 - DNA, 264 bp, Canis familiaris; identical to SEQ ID NO: 5563

SEQ ID NO: 215671 - DNA, 367 bp, Canis familiaris; identical to SEQ ID NO: 5564
  misc_feature (133)..(133): n is a, c, g, or t
  misc_feature (165)..(165): n is a, c, g, or t
  misc_feature (323)..(323): n is a, c, g, or t
  misc_feature (351)..(351): n is a, c, g, or t
  misc_feature (360)..(360): n is a, c, g, or t

SEQ ID NO: 215672 - DNA, 600 bp, Canis familiaris
  misc_feature (377)..(377): n is a, c, g, or t
  misc_feature (397)..(397): n is a, c, g, or t
  misc_feature (409)..(409): n is a, c, g, or t
  misc_feature (435)..(435): n is a, c, g, or t
  misc_feature (438)..(439): n is a, c, g, or t
  misc_feature (465)..(465): n is a, c, g, or t
  misc_feature (469)..(469): n is a, c, g, or t
  misc_feature (512)..(512): n is a, c, g, or t
  misc_feature (517)..(517): n is a, c, g, or t
  misc_feature (551)..(551): n is a, c, g, or t
  misc_feature (565)..(565): n is a, c, g, or t
  misc_feature (586)..(586): n is a, c, g, or t
  misc_feature (592)..(592): n is a, c, g, or t
cagcatgagtggatgaccaagttttacaggaaaactccagtgattttcaatcaaacattgcataggcagccaaggagcagtgagcagcagctactacagtagtggaagccgtgcatctatgggagtgaacggaatgggagggatgtctagcatgtccagtatgagtggtggatggggaatgtaactgatcctgatcactgactcttggtcaacgttttttaaagaaaaaaaagtttaacagttttgcaatacaagcttgtgattgatgcttattactctaagtgggaatcaggattgttttaaagacttaaggttcaagtatttttgaacacaaacattcatctaggatgtaacacctgagtaaactagaactggtnaacaattttcaacttttctntaattctattgnaggaaggacctaataagcaagaaagnggnnttaggttaaacaagttgaattttgtnaaangtggttttttacccgttaattgaaccttttgggatcctttttnaaaanatcctttttttaaaaccaatataggacttgtgtntacaattaaaaggnacacattggcaggtggtaatntagttnattaaaaa

SEQ ID NO: 215673 - DNA, 295 bp, Canis familiaris; identical to SEQ ID NO: 5566
  misc_feature (231)..(231): n is a, c, g, or t

SEQ ID NO: 215674 - DNA, 403 bp, Canis familiaris; identical to SEQ ID NO: 5567

SEQ ID NO: 215675 - DNA, 600 bp, Canis familiaris
  misc_feature (360)..(360): n is a, c, g, or t
  misc_feature (404)..(404): n is a, c, g, or t
  misc_feature (416)..(416): n is a, c, g, or t
  misc_feature (434)..(434): n is a, c, g, or t
  misc_feature (449)..(449): n is a, c, g, or t
  misc_feature (482)..(482): n is a, c, g, or t
  misc_feature (519)..(519): n is a, c, g, or t
  misc_feature (538)..(538): n is a, c, g, or t
  misc_feature (566)..(566): n is a, c, g, or t
  misc_feature (571)..(571): n is a, c, g, or t
  misc_feature (580)..(580): n is a, c, g, or t
cggccctcggccaccgcgtcctcacgccccttcctcccgacggcctcctcagtggtcctgccccatggccacccctccttgactgttaggaccagagtatgaagaagtaagatataaatatgtatacatatataaatatatttttaattacgtgtcgtgtcacagtggctccagacgtacggtttgccgagtttatcccactgcttgaaagtgcttcctggccaatccaaataacaatttaagctgtttttctaaatgcaggttgctgctactctttgggatatggaaggaaaacgttttaaaaaaattttttttaaaggaaataacagtaaagtataaaatctgtgactctgaggccgncttccaagggagaccactcaaacaggaacccaagggcaggagtnggtgccccgcanacccagcccttcctgggncagacaccccctttnggctgacaaggaaggccgattcaagttgacctntgaatgactcgatgggaggcaaaatggtattgatttntgaggtggcccccggtttnttgccatgaggaggcaggccccattgangtganctgttccgntgtcccccccggcaaaaaaa

SEQ ID NO: 215676 - DNA, 600 bp, Canis familiaris
  misc_feature (435)..(435): n is a, c, g, or t
  misc_feature (472)..(472): n is a, c, g, or t
  misc_feature (518)..(518): n is a, c, g, or t
  misc_feature (526)..(526): n is a, c, g, or t
  misc_feature (529)..(529): n is a, c, g, or t
  misc_feature (558)..(558): n is a, c, g, or t
  misc_feature (585)..(585): n is a, c, g, or t
  misc_feature (597)..(597): n is a, c, g, or t
agaaggcacctgtggctcagtcagaagagcatgccacacttaatcttgggttgggggtttaagccccacgttgaggatagagaatacttaaataaaacctaaaaaagaaaaaaaggaagagaggtaaaagggttccttgaggaacctcaatcttgtgacttttggtacacttgtatagaacgtatatggccttgcctttgtggtattgtgctgcactatacgccttggcatatgaacacctgttgttttacagaacatcaagcttaataatacttaaatattttgaggatgaaggttaagatcattaagctgaaattcagagcctaccatgatatccttggcagattactggttccactattgtttctttacttgaataagaatgaatgaggttgaaaagtaacagaaaagaaactggcttttcatacaatgcantattaacttcccaagggatgcccacacggggcttaantccaggaccctgaaacatacctggctgaagtaaatcttaaccggtnacccctanggnccttgtgtcactgtaaacaccgcctttanattggctattgaacataaatactttgngtgaattacttnttt

SEQ ID NO: 215677 - DNA, 430 bp, Canis familiaris; identical to SEQ ID NO: 5570
  misc_feature (112)..(112): n is a, c, g, or t
  misc_feature (413)..(413): n is a, c, g, or t

SEQ ID NO: 215678 - DNA, 525 bp, Canis familiaris; identical to SEQ ID NO: 5571
  misc_feature (477)..(477): n is a, c, g, or t
  misc_feature (479)..(479): n is a, c, g, or t
  misc_feature (482)..(482): n is a, c, g, or t
  misc_feature (510)..(510): n is a, c, g, or t

SEQ ID NO: 215679 - DNA, 600 bp, Canis familiaris
  misc_feature (389)..(389): n is a, c, g, or t
  misc_feature (396)..(396): n is a, c, g, or t
  misc_feature (427)..(427): n is a, c, g, or t
  misc_feature (503)..(503): n is a, c, g, or t
  misc_feature (514)..(514): n is a, c, g, or t
  misc_feature (547)..(547): n is a, c, g, or t
  misc_feature (565)..(565): n is a, c, g, or t
ccaccttggaaccgaaggtgaactgcactggggaaaagtgtggggaagcagagaagacaagaggcagcacggggcgagggacgagtttcacagcagaggttttccctcccaagggaacccctgcttctgggccttttccctgggttttaaagaaatgggcaaagtggtagattggaggttgtacctctgcacggtgactgctggacagggaatcacacaacacggcgcgagttcagagtatttgtttaatggctgtgcctacgaattacttgagtaggtaatcatgtaacagtggaagcgcatccgctaaaaggattatcgaggcttcagatcggaggtggaaagagtatacgtttgatttttttgctttggcaacacaaaaggaagtngggcctnaggaaaaattttaggagaaaccggccgtcanaaggacaaaggtttgacgcttaagaagaaggggggccaacgatgtgtccggttgccatgaaccccaacaacagcancaccaaaatanatggaatggtgcatattgaaaaatattagcatncctgtaatggaactgttntaggggagggtgtttttcaataaggcttcttttct

SEQ ID NO: 215680 - DNA, 600 bp, Canis familiaris
  misc_feature (388)..(388): n is a, c, g, or t
  misc_feature (422)..(422): n is a, c, g, or t
  misc_feature (429)..(429): n is a, c, g, or t
  misc_feature (437)..(437): n is a, c, g, or t
  misc_feature (487)..(487): n is a, c, g, or t
  misc_feature (491)..(491): n is a, c, g, or t
  misc_feature (518)..(518): n is a, c, g, or t
  misc_feature (526)..(526): n is a, c, g, or t
  misc_feature (529)..(529): n is a, c, g, or t
  misc_feature (574)..(574): n is a, c, g, or t
  misc_feature (595)..(595): n is a, c, g, or t
agtgtctttgggtagaagttttgacgaaaaaggagacattgatggagaggatcaggtttgtgtctcagaaataaacagaatgagtaccagaggtttcagtactgaaaagcaacgccttccaacattgcaacaggatgaatttttaaaatcaagtgttcagtcaaagccttggagtttggcagactcagctgataatttagaagccagcataagagaagacgagtataaaactgaggaaaaacttgatttatttacttcaaagtgtgctgacctgtgtatggattctattaaaacttctgatgccgatgatgaagttggttcttccaaagaagaaagtaaaaagtttacttattcccaaagccccagttttgatcccacagaagaaagnggtctggatgattctattaagtgtaaaaaatggnggcaggngtaatggntttgtgacttgcatgatcctaacgaggatgagtttggggacttggcccanccgnggtgcaactcccctttcgttcctggtnctaagatnaanggcgattcctttgaagagtctaaacctttcaaatttatgaccagngtgcttgggaattgggtcaanctgtt

SEQ ID NO: 215681 - DNA, 600 bp, Canis familiaris
  misc_feature (316)..(316): n is a, c, g, or t
  misc_feature (409)..(409): n is a, c, g, or t
  misc_feature (455)..(455): n is a, c, g, or t
  misc_feature (469)..(469): n is a, c, g, or t
  misc_feature (476)..(476): n is a, c, g, or t
  misc_feature (499)..(499): n is a, c, g, or t
  misc_feature (517)..(517): n is a, c, g, or t
  misc_feature (527)..(527): n is a, c, g, or t
  misc_feature (536)..(536): n is a, c, g, or t
  misc_feature (558)..(558): n is a, c, g, or t
  misc_feature (579)..(579): n is a, c, g, or t
  misc_feature (586)..(586): n is a, c, g, or t
tcaagaatcctctgagtccccagatgttgtggacagacaccaaaccatggaggtgtcctgttaagcagatgctcctcccctggaccatgcaagtccaccctctttcaaccaaccactccataatataacatttcatccagcaaactggcatttatctttaactcctgcatggccactgacactctctggtatcctggatttatcattctcactgcctgcccaccctcctttttgtatgtaccaaggaccacttccttaccattactgtaacattctagcatctttatctgatcaagatttccatatcttctcttgncagctttttctcgtgctttcccaactacgtatctgacaaagaatcttttgatcctgatggatgtggtgtgagcaccccgtgtctggggtttgnggtgggcataagtctgtgaatttagatggctttcttggagagcttntgcaaagaaaaccngaaactnaaaacaaaggggaactttttttnatttcaatggattttaanggaaaatcanaacaggttntaggtgggtaggcccttcattntttttggttccaatggtcaanagattgnaaagtacttaacag

SEQ ID NO: 215682 - DNA, 575 bp, Canis familiaris; identical to SEQ ID NO: 5575
  misc_feature (373)..(373): n is a, c, g, or t
  misc_feature (419)..(419): n is a, c, g, or t
  misc_feature (506)..(506): n is a, c, g, or t

SEQ ID NO: 215683 - DNA, 333 bp, Canis familiaris; identical to SEQ ID NO: 5576
  misc_feature (78)..(78): n is a, c, g, or t

SEQ ID NO: 215684 - DNA, 486 bp, Canis familiaris; identical to SEQ ID NO: 5577
  misc_feature (408)..(408): n is a, c, g, or t
  misc_feature (414)..(414): n is a, c, g, or t
  misc_feature (474)..(474): n is a, c, g, or t

SEQ ID NO: 215685 - DNA, 600 bp, Canis familiaris
  misc_feature (427)..(427): n is a, c, g, or t
  misc_feature (454)..(454): n is a, c, g, or t
  misc_feature (471)..(471): n is a, c, g, or t
  misc_feature (503)..(504): n is a, c, g, or t
  misc_feature (529)..(529): n is a, c, g, or t
  misc_feature (546)..(546): n is a, c, g, or t
  misc_feature (548)..(548): n is a, c, g, or t
  misc_feature (557)..(557): n is a, c, g, or t
  misc_feature (575)..(575): n is a, c, g, or t
ggtaactgacgcctttcattctgttcgatttacaccgaacaagccagcatctgatcaaaagcattacctaaaatcttccttaaactattgaaaggtgctttgatgattttctcctttggtttgtagaattagaactgagcttttgacaaagcgcttagagttgccatcacttttctgtggtcaaactactgatacttgcttttctttataaggaaatattgcctaaggatgtctgctgtttgttttcagaagttttccagtgggaatgctgtctgcgttatgtctgaatgtgcaagtgcgtattttgtttgttgctgttggtttttgttgttttgttttgttagatgttcctctcactagccttgtgttcgcactggtaagctttacttgtctcctttgccaatcaaatgttaaagactatgggggncttttttttttttttttaaataaacgngcattgggcatctattnaatctttgacaagggttcaagaatgacttcannggggttttggaaacaactaatattnttggtttggggttcccnanaattatttnaaagttaattgtgggctntaatccaccggccctttaaaatgac

SEQ ID NO: 215686 - DNA, 445 bp, Canis familiaris; identical to SEQ ID NO: 5579
  misc_feature (417)..(417): n is a, c, g, or t
  misc_feature (434)..(434): n is a, c, g, or t

SEQ ID NO: 215687 - DNA, 600 bp, Canis familiaris
  misc_feature (209)..(209): n is a, c, g, or t
  misc_feature (234)..(234): n is a, c, g, or t
  misc_feature (261)..(261): n is a, c, g, or t
  misc_feature (287)..(287): n is a, c, g, or t
  misc_feature (300)..(301): n is a, c, g, or t
  misc_feature (387)..(387): n is a, c, g, or t
  misc_feature (395)..(395): n is a, c, g, or t
  misc_feature (405)..(405): n is a, c, g, or t
  misc_feature (419)..(419): n is a, c, g, or t
  misc_feature (421)..(421): n is a, c, g, or t
  misc_feature (440)..(440): n is a, c, g, or t
  misc_feature (461)..(461): n is a, c, g, or t
  misc_feature (484)..(484): n is a, c, g, or t
  misc_feature (498)..(498): n is a, c, g, or t
  misc_feature (502)..(502): n is a, c, g, or t
  misc_feature (527)..(528): n is a, c, g, or t
  misc_feature (580)..(580): n is a, c, g, or t
  misc_feature (588)..(588): n is a, c, g, or t
acttcaaattacaggaccaagccctaaaggaaagcatcccatttgctgtaattggcagcaacactgtggtagaggccagagggcggcgtgttcggggccggctctacccctggggcatcgtggaagtggaaaacccaggacactgcgactttgtgaagctgaggacaatgctggtgcgtactcatatgcaggacctgaaggatgtgacncgggagacacattatgagaactatngggcacagtgcatccagagcatgactngtctggtggtgaaagaaaggaattgnaacaaactgactnnagagaagtggtactgacttccccatccctgctgtccaccagggacagatccagaaacagagaggctgatccgagaagaaagatgangagctgcngcggatgcangagatgcttgcatnanaattcaaagacagatgaangagacccattagttttcaatnctggggtattttaaatcttcttntttgtcttgccaangccnggcccttccagaccagttttgttanncccttgtagttctggcactttgctttaaatcctgttgcctcccagagcttanagggaaanaagtttataaat

SEQ ID NO: 215688 - DNA, 638 bp, Canis familiaris; identical to SEQ ID NO: 5581
  misc_feature (450)..(450): n is a, c, g, or t
  misc_feature (469)..(469): n is a, c, g, or t
  misc_feature (480)..(480): n is a, c, g, or t
  misc_feature (485)..(485): n is a, c, g, or t
  misc_feature (494)..(494): n is a, c, g, or t
  misc_feature (508)..(508): n is a, c, g, or t
  misc_feature (533)..(533): n is a, c, g, or t
  misc_feature (548)..(548): n is a, c, g, or t
  misc_feature (554)..(554): n is a, c, g, or t
  misc_feature (595)..(595): n is a, c, g, or t
  misc_feature (634)..(634): n is a, c, g, or t
  misc_feature (637)..(637): n is a, c, g, or t

SEQ ID NO: 215689 - DNA, 600 bp, Canis familiaris
  misc_feature (483)..(483): n is a, c, g, or t
  misc_feature (539)..(539): n is a, c, g, or t
  misc_feature (556)..(556): n is a, c, g, or t
cattccagaaaaacttgggcaggcaagtttttagaactgcccccactatgctgcagtagattatctttctgttggagattttctactgcatttcaatcccattatggtgaaaacatttctggattgaaaaaaatatatataagtgcatgcaatttgatctgagtatcaacccaagtctaggaatttgcaatgaaaaacattctaatgaaaaatgctctattcatagaaccgaaggttttatctgggccttctagttttgctaatgagaaaagagtagctacaatgttatttaaatccatgctaggccaaagtgccaaattaaaatcatgtattgaggtttttattccagatcatttactctcctccttctaatcacactctacaataaaaattaggggggagggataatacacacatatatcttgcttcaaggggaaggaaggatgattaaatccttttactttcttaacttttttgttatgnaacttaaggcttggtcaaaaccttatttgagtcggggtttgcaaactgaatggaanaacccttttggaaaaanacttcaaacttaaaaaaaaaaaaaaagggggccgtttaaggatc

SEQ ID NO: 215690 - DNA, 560 bp, Canis familiaris; identical to SEQ ID NO: 5583
  misc_feature (339)..(339): n is a, c, g, or t
  misc_feature (395)..(395): n is a, c, g, or t
  misc_feature (417)..(417): n is a, c, g, or t
  misc_feature (428)..(428): n is a, c, g, or t
  misc_feature (448)..(448): n is a, c, g, or t
  misc_feature (459)..(459): n is a, c, g, or t
  misc_feature (478)..(478): n is a, c, g, or t
  misc_feature (489)..(489): n is a, c, g, or t

SEQ ID NO: 215691 - DNA, 538 bp, Canis familiaris; identical to SEQ ID NO: 5584
  misc_feature (469)..(469): n is a, c, g, or t
  misc_feature (484)..(484): n is a, c, g, or t
  misc_feature (502)..(502): n is a, c, g, or t
  misc_feature (507)..(507): n is a, c, g, or t
  misc_feature (522)..(522): n is a, c, g, or t
  misc_feature (532)..(532): n is a, c, g, or t

SEQ ID NO: 215692 - DNA, 330 bp, Canis familiaris; identical to SEQ ID NO: 5585
  misc_feature (22)..(22): n is a, c, g, or t
  misc_feature (43)..(43): n is a, c, g, or t
  misc_feature (109)..(109): n is a, c, g, or t
  misc_feature (313)..(313): n is a, c, g, or t

SEQ ID NO: 215693 - DNA, 511 bp, Canis familiaris; identical to SEQ ID NO: 5586
  misc_feature (36)..(36): n is a, c, g, or t
  misc_feature (39)..(39): n is a, c, g, or t
  misc_feature (42)..(42): n is a, c, g, or t
  misc_feature (363)..(363): n is a, c, g, or t
  misc_feature (371)..(371): n is a, c, g, or t
  misc_feature (430)..(430): n is a, c, g, or t
  misc_feature (448)..(448): n is a, c, g, or t
  misc_feature (479)..(479): n is a, c, g, or t
  misc_feature (488)..(488): n is a, c, g, or t

SEQ ID NO: 215694 - DNA, 598 bp, Canis familiaris; identical to SEQ ID NO: 5587
  misc_feature (465)..(465): n is a, c, g, or t
  misc_feature (497)..(497): n is a, c, g, or t
  misc_feature (504)..(504): n is a, c, g, or t
  misc_feature (528)..(528): n is a, c, g, or t

SEQ ID NO: 215695 - DNA, 600 bp, Canis familiaris
  misc_feature (438)..(438): n is a, c, g, or t
  misc_feature (460)..(460): n is a, c, g, or t
  misc_feature (498)..(498): n is a, c, g, or t
  misc_feature (534)..(534): n is a, c, g, or t
  misc_feature (585)..(585): n is a, c, g, or t
  misc_feature (588)..(588): n is a, c, g, or t
aagagaaacaatctaaattccagtaaacataaaccttaatttaagtatgcacgtcattatcttctcctgtaaaacaatttctgtctttaaaggtactggccatgaagaggggaaaccccagagctataaacaaactgattgggttggtccgaaaagcaactctcagccgagcagacccgactgtgataaaggagatcctggagaagaagctgtcatcgtgagccattttgggtccctgagggagagtgggcggcccgtgactgagaaccagagcctgggacacctgacattcaggggctcgacagagctggtgcctcccaggccctggcccagctggagccctaggatgcccctcacacagaccagtagtgacagcccagttgcttcatggacctcaaaatggctccaccacagcagtgggtagcaaatagcacgttncagtgctaatgattctgaactnaaggaggcaccatttcagatgatgtcaccattttaagnaaaacccttattttgagttcctaacaaaaattttgngtaagtccaaaaaccaagccttgttttggtgccagaatgacaatggtcaanaanacatggttgaac

SEQ ID NO: 215696 - DNA, 491 bp, Canis familiaris; identical to SEQ ID NO: 5589
  misc_feature (27)..(27): n is a, c, g, or t
  misc_feature (369)..(369): n is a, c, g, or t
  misc_feature (444)..(444): n is a, c, g, or t
  misc_feature (479)..(480): n is a, c, g, or t

SEQ ID NO: 215697 - DNA, 517 bp, Canis familiaris; identical to SEQ ID NO: 5590
  misc_feature (432)..(432): n is a, c, g, or t
  misc_feature (444)..(444): n is a, c, g, or t
  misc_feature (472)..(472): n is a, c, g, or t
  misc_feature (478)..(478): n is a, c, g, or t
  misc_feature (496)..(496): n is a, c, g, or t
  misc_feature (502)..(502): n is a, c, g, or t

SEQ ID NO: 215698 - DNA, 590 bp, Canis familiaris; identical to SEQ ID NO: 5591
  misc_feature (450)..(450): n is a, c, g, or t
  misc_feature (479)..(479): n is a, c, g, or t
  misc_feature (492)..(492): n is a, c, g, or t
  misc_feature (509)..(509): n is a, c, g, or t
  misc_feature (520)..(520): n is a, c, g, or t
  misc_feature (539)..(539): n is a, c, g, or t
  misc_feature (550)..(552): n is a, c, g, or t
  misc_feature (562)..(562): n is a, c, g, or t

SEQ ID NO: 215699 - DNA, 593 bp, Canis familiaris; identical to SEQ ID NO: 5592
  misc_feature (413)..(413): n is a, c, g, or t
  misc_feature (451)..(451): n is a, c, g, or t
  misc_feature (459)..(459): n is a, c, g, or t
  misc_feature (473)..(473): n is a, c, g, or t
  misc_feature (478)..(478): n is a, c, g, or t
  misc_feature (488)..(488): n is a, c, g, or t
  misc_feature (516)..(516): n is a, c, g, or t
  misc_feature (583)..(583): n is a, c, g, or t

SEQ ID NO: 215700 - DNA, 589 bp, Canis familiaris; identical to SEQ ID NO: 5593
  misc_feature (420)..(420): n is a, c, g, or t
  misc_feature (425)..(425): n is a, c, g, or t
  misc_feature (451)..(451): n is a, c, g, or t
  misc_feature (454)..(454): n is a, c, g, or t
  misc_feature (469)..(469): n is a, c, g, or t
  misc_feature (477)..(477): n is a, c, g, or t
  misc_feature (516)..(516): n is a, c, g, or t
  misc_feature (560)..(560): n is a, c, g, or t
  misc_feature (570)..(570): n is a, c, g, or t

SEQ ID NO: 215701 - DNA, 600 bp, Canis familiaris
  misc_feature (425)..(425): n is a, c, g, or t
  misc_feature (445)..(445): n is a, c, g, or t
  misc_feature (475)..(475): n is a, c, g, or t
  misc_feature (502)..(502): n is a, c, g, or t
  misc_feature (544)..(544): n is a, c, g, or t
  misc_feature (547)..(547): n is a, c, g, or t
  misc_feature (554)..(554): n is a, c, g, or t
  misc_feature (585)..(585): n is a, c, g, or t
  misc_feature (588)..(588): n is a, c, g, or t
gcatatatacaatatacctatataacaaaattcagtgtcaagctttcttatgcaagggatttaccccaccccaccccataaaaaagaacctagttccatgggtctttccgagtagattatcaagggatgatagaaaagattttaacaagtcatcctaagaaagcctcacctgcagagccgcatgcgtctgcacacagttttaggctttgtaaattggggtgaggtgggccagcatgaaagctagggctcctggtctgggctgtagagaatggagcgccagggcacacgggtggggtgacagcaccgtccggagaccctggggggctggtcctaggctttcccactaccttgctatgtgacctttggtagagttcatttcccaggtctcggttttcttatttgtgaaagtgacaggggagatcatntggccccaaaagtgagactntacctatgctttcttcttaactggaaaacnaaaaggggcggaactgaggggtcaggnggaaatgtgtgcaattgaccttgcaaaggggcaggcccttgncanactttgnttaggaaaggcacaggaggatgttaacatantanactgggaccctg

SEQ ID NO: 215702 - DNA, 325 bp, Canis familiaris; identical to SEQ ID NO: 5595

SEQ ID NO: 215703 - DNA, 478 bp, Canis familiaris; identical to SEQ ID NO: 5596
  misc_feature (421)..(421): n is a, c, g, or t
  misc_feature (435)..(435): n is a, c, g, or t
  misc_feature (450)..(450): n is a, c, g, or t
  misc_feature (469)..(469): n is a, c, g, or t

SEQ ID NO: 215704 - DNA, 530 bp, Canis familiaris; identical to SEQ ID NO: 5597
  misc_feature (396)..(396): n is a, c, g, or t

SEQ ID NO: 215705 - DNA, 635 bp, Canis familiaris; identical to SEQ ID NO: 5598
  misc_feature (467)..(467): n is a, c, g, or t
  misc_feature (493)..(493): n is a, c, g, or t
  misc_feature (496)..(496): n is a, c, g, or t
  misc_feature (517)..(517): n is a, c, g, or t
  misc_feature (531)..(531): n is a, c, g, or t
  misc_feature (544)..(544): n is a, c, g, or t
  misc_feature (559)..(559): n is a, c, g, or t
  misc_feature (600)..(600): n is a, c, g, or t

SEQ ID NO: 215706 - DNA, 440 bp, Canis familiaris; identical to SEQ ID NO: 5599
  misc_feature (424)..(424): n is a, c, g, or t
  misc_feature (431)..(431): n is a, c, g, or t

SEQ ID NO: 215707 - DNA, 439 bp, Canis familiaris; identical to SEQ ID NO: 5600

SEQ ID NO: 215708 - DNA, 499 bp, Canis familiaris; identical to SEQ ID NO: 5601
  misc_feature (385)..(385): n is a, c, g, or t
  misc_feature (453)..(453): n is a, c, g, or t
  misc_feature (458)..(458): n is a, c, g, or t
  misc_feature (468)..(468): n is a, c, g, or t
  misc_feature (484)..(484): n is a, c, g, or t

SEQ ID NO: 215709 - DNA, 543 bp, Canis familiaris; identical to SEQ ID NO: 5602
  misc_feature (438)..(438): n is a, c, g, or t
  misc_feature (508)..(508): n is a, c, g, or t
  misc_feature (524)..(524): n is a, c, g, or t

SEQ ID NO: 215710 - DNA, 423 bp, Canis familiaris; identical to SEQ ID NO: 5603
  misc_feature (382)..(382): n is a, c, g, or t

SEQ ID NO: 215711 - DNA, 511 bp, Canis familiaris; identical to SEQ ID NO: 5604
  misc_feature (342)..(342): n is a, c, g, or t
  misc_feature (456)..(456): n is a, c, g, or t
  misc_feature (485)..(485): n is a, c, g, or t
  misc_feature (487)..(487): n is a, c, g, or t
  misc_feature (492)..(492): n is a, c, g, or t

SEQ ID NO: 215712 - DNA, 439 bp, Canis familiaris; identical to SEQ ID NO: 5605
  misc_feature (360)..(360): n is a, c, g, or t
  misc_feature (373)..(373): n is a, c, g, or t

SEQ ID NO: 215713 - DNA, 586 bp, Canis familiaris; identical to SEQ ID NO: 5606
  misc_feature (417)..(417): n is a, c, g, or t
  misc_feature (463)..(463): n is a, c, g, or t
  misc_feature (475)..(475): n is a, c, g, or t
  misc_feature (490)..(490): n is a, c, g, or t
  misc_feature (558)..(558): n is a, c, g, or t
  misc_feature (562)..(562): n is a, c, g, or t

SEQ ID NO: 215714 - DNA, 600 bp, Canis familiaris
  misc_feature (268)..(268): n is a, c, g, or t
  misc_feature (397)..(397): n is a, c, g, or t
  misc_feature (418)..(418): n is a, c, g, or t
  misc_feature (449)..(449): n is a, c, g, or t
  misc_feature (479)..(479): n is a, c, g, or t
  misc_feature (487)..(487): n is a, c, g, or t
  misc_feature (524)..(524): n is a, c, g, or t
  misc_feature (526)..(526): n is a, c, g, or t
  misc_feature (550)..(550): n is a, c, g, or t
  misc_feature (593)..(593): n is a, c, g, or t
atcctcccacagacaccccagagagaggaagcccctttggggtggggaggtgagggatttcatctcaacacaggctgagaatgaggggagggggcttttttttctttctttctttccttttttttttttttttttttggaacatgttaggagttaatgttgcaaagagtagtttacatcttcactttctgaagacacttgaatttaggaccgacttatctgtgacaggcatgccaggagcggccagagccatcaaggcttgccgcttnctaccccccacactcccgtgggggtccaagatctgagacacaaagcagcagcctgcccaaacctttctgctcatcctgtacccttccatgattggtccatgccagtacgacctttgggcattgaacatnaaaaggtttgtgtaccttggnccttgccaaggggcaagtttttttttgcctntttttgaacttggaacaaatgccttaccantaaaaagnggttgcttggccttccccaacctggacccccaagggntnaaatcaagtgtggagccttatttnaaaagttttaatttttttttgttcacttggactttttacccanccaaccc

SEQ ID NO: 215715 - DNA, 666 bp, Canis familiaris; identical to SEQ ID NO: 5608
  misc_feature (448)..(448): n is a, c, g, or t
  misc_feature (450)..(450): n is a, c, g, or t
  misc_feature (487)..(487): n is a, c, g, or t
  misc_feature (506)..(506): n is a, c, g, or t
  misc_feature (514)..(514): n is a, c, g, or t
  misc_feature (549)..(549): n is a, c, g, or t
  misc_feature (553)..(553): n is a, c, g, or t
  misc_feature (564)..(564): n is a, c, g, or t
  misc_feature (606)..(606): n is a, c, g, or t
  misc_feature (629)..(629): n is a, c, g, or t
  misc_feature (632)..(633): n is a, c, g, or t
  misc_feature (656)..(656): n is a, c, g, or t
  misc_feature (660)..(660): n is a, c, g, or t

SEQ ID NO: 215716 - DNA, 600 bp, Canis familiaris
  misc_feature (367)..(367): n is a, c, g, or t
  misc_feature (392)..(392): n is a, c, g, or t
  misc_feature (412)..(412): n is a, c, g, or t
  misc_feature (430)..(430): n is a, c, g, or t
  misc_feature (446)..(446): n is a, c, g, or t
  misc_feature (471)..(471): n is a, c, g, or t
  misc_feature (481)..(481): n is a, c, g, or t
  misc_feature (520)..(520): n is a, c, g, or t
  misc_feature (551)..(551): n is a, c, g, or t
  misc_feature (553)..(553): n is a, c, g, or t
  misc_feature (573)..(573): n is a, c, g, or t
  misc_feature (576)..(576): n is a, c, g, or t
atactatctttatttttagttagctacagagacttagattcccctgatacctcatgccatggtctctgcaaggcccttcagttttagtctacagcgcagttatgacacccatgcctcacacaccatagtgtgttgggaatcggttaaccttcgatgacagcggtctcctctgttgcctctgccacagatactcatgcttgttgatcaggcataggtgtacaggtatccctgtcagacctgtgatgatagtgattgttagcattaatttccctacatggtgttgatctataaatcccactctctttcttgctttttttcctctccactttttttgatatctgttcatactgctgaatatatacctggnttattgcttttaactagactgtcgngatcccatggtacacaaaantcttggttattccctagnggtaggacagcatatnaaacaatttctggtttggtacaaanggccttgaantttggccctacaaaagctggttacctgctatgattttgngggacaccatgaaaggctgaggggttttggntnctggaggtcctcgatggtgnggnattgggggtaactggggctgagga

SEQ ID NO: 215717 - DNA, 600 bp, Canis familiaris
  misc_feature (414)..(414): n is a, c, g, or t
  misc_feature (425)..(425): n is a, c, g, or t
  misc_feature (449)..(449): n is a, c, g, or t
  misc_feature (451)..(451): n is a, c, g, or t
  misc_feature (479)..(480): n is a, c, g, or t
  misc_feature (570)..(570): n is a, c, g, or t
  misc_feature (579)..(579): n is a, c, g, or t
cgtagaaaccttgatattgagcgcccaacctacactaacctcaaccgccttattagccagattgtgtcctccatcactgcttccctcagatttgatggagccctgaatgtggatctgacggagttccagaccaacctggtgccctatccccgcatccacttccctctggccacatatgcccctgtcatctctgctgagaaagcctaccatgaacagctttctgtagcagagatcaccaatgcatgctttgagccagccaaccagatggtgaaatgtgaccctcgccatggtaaatacatggcttgctgcctgttgtaccgtggtgacgtggttcccaaagatgtcaatgctgccattggcaccatcaagaccaagcgcagcattcagtttgtagactgggccccactggctttnaaagtgggcantaattacaagccttccactggggnancccgggggagaactgggccaaagacaannagcttttgtgcttgtttagcaaaacccaaaccattgttaggcctgggcttgctggacccaagtttacctgatgttgccaagcggcctttnttactggtntttgggtaagggatgaggaag

SEQ ID NO: 215718 - DNA, 600 bp, Canis familiaris
  misc_feature (350)..(350): n is a, c, g, or t
  misc_feature (357)..(357): n is a, c, g, or t
  misc_feature (393)..(393): n is a, c, g, or t
  misc_feature (403)..(403): n is a, c, g, or t
  misc_feature (442)..(442): n is a, c, g, or t
  misc_feature (445)..(445): n is a, c, g, or t
  misc_feature (475)..(475): n is a, c, g, or t
  misc_feature (502)..(502): n is a, c, g, or t
  misc_feature (547)..(547): n is a, c, g, or t
  misc_feature (560)..(560): n is a, c, g, or t
  misc_feature (569)..(569): n is a, c, g, or t
  misc_feature (572)..(572): n is a, c, g, or t
ctccgccagctatttggaggtgaccccagactctgaaaatgatttcggaaactacaactgtactgcagtgaaccgcattggacaggagtctttggaattcatccttgtccaagcagacaccccgtcttcaccatccatcgaccaggtggagccgtactctagcacagcacaggtgcagtttgatgaaccagaggccacaggtggggtgcccatcctcaaatacaaggctgagtggagagcactgggcgaggaagtgtggcatttcaagtggtatgatgccaaagaagccaacatggagggcatcgtcaccattgtgggcctgaagcccgagaccacatacgctgtgcggntggcggncctgaatgggaagggcctgggtgagatcagcacggncttcgagttnaagaaacaagcagtccgggaacccaacgcactaaacttnaanggcaaatggcgaggatggaactttttaagngaaccttttaagcaggatgacgggggntcccataaacctacttggtcaagtccgacgaagtgtcttcggggnggaaccaaaaatnggttccgtntgnagggccacgtatgctaagtcctggatgg

SEQ ID NO: 215719 - DNA, 529 bp, Canis familiaris; identical to SEQ ID NO: 5612
  misc_feature (330)..(330): n is a, c, g, or t
  misc_feature (405)..(405): n is a, c, g, or t
  misc_feature (435)..(435): n is a, c, g, or t
  misc_feature (474)..(474): n is a, c, g, or t
  misc_feature (493)..(493): n is a, c, g, or t
  misc_feature (506)..(507): n is a, c, g, or t

SEQ ID NO: 215720 - DNA, 517 bp, Canis familiaris; identical to SEQ ID NO: 5613
  misc_feature (443)..(443): n is a, c, g, or t
  misc_feature (496)..(496): n is a, c, g, or t
  misc_feature (502)..(502): n is a, c, g, or t

SEQ ID NO: 215721 - DNA, 600 bp, Canis familiaris
  misc_feature (204)..(204): n is a, c, g, or t
  misc_feature (467)..(467): n is a, c, g, or t
  misc_feature (493)..(493): n is a, c, g, or t
  misc_feature (521)..(521): n is a, c, g, or t
  misc_feature (530)..(530): n is a, c, g, or t
  misc_feature (574)..(574): n is a, c, g, or t
  misc_feature (576)..(576): n is a, c, g, or t
  misc_feature (585)..(585): n is a, c, g, or t
caaaagtacttttgaaaatgtgggtggccttcagtcttgttgaaaagaagatagccatctttgggatgcttgcctggctcagccgttgagcctctgccttcctttggctggctcggggtgtgaccctggggtcctgggatggggtcctgggatggagtcccacattgggcttcccgcaggaagcctgcttctccctctgccagngtgagaggcagacgcttctctctgtgtgtctcatgaataaattaatttaattaaaaaaacgaagatagccatcttctttacttcttagctgtaaagcattttcatgtttagatttataaacaacaattagaactagcaaatcaaacacattggacttcttaaatgtatacaatgtatgtcaattgtatctcagtaaaactggaagaaaaaagaattagcaattcaatgaatttttcctctctacatcatgatttcctttcagntatatttgcatatacattccctttancatttgttgactcccaacataatcaagngtttttganccaaacatcaaaaaagatggcaaatttttcaaatttttttggangnttaaggtcnttgttccaaaaattg

SEQ ID NO: 215722 - DNA, 600 bp, Canis familiaris
  misc_feature (398)..(398): n is a, c, g, or t
  misc_feature (422)..(422): n is a, c, g, or t
  misc_feature (437)..(437): n is a, c, g, or t
  misc_feature (446)..(446): n is a, c, g, or t
  misc_feature (453)..(453): n is a, c, g, or t
  misc_feature (462)..(462): n is a, c, g, or t
  misc_feature (499)..(499): n is a, c, g, or t
  misc_feature (580)..(580): n is a, c, g, or t
ccctaccatggcattccccaggcccctgctggtgctagccctgctggcatgggttgttctggctgaccaagaatcatgcaagggccgctgcacagagggcttcaatgctgacaggaagtgtcagtgtgacgagctctgctcttactaccagagctgctgcgaggactacgtggccgagtgcaaaccccaagtgactcgtggggatgtattcgctctgccagaagatgagtatggggtcattgacgatcatgaggggaccagagaacagagcgtctcacacagctggagagtaccaccctgagccctggcctacaggcccagtctgaaaagtttcctgcccaggtacctattctgatccctgaggaagaggcttcaggacccgggcagggggaccttantggtttgaggcccttgatcaaganattttttaatcccancaaaaggangagcttntttatgggnaaaccctttgacgcctttaattgacctcaagaatggnttccttttttgccttccgagggcagtacttgttttagcttggttgaaaaggcaatgagacctggtacccaagcttttccanatgtttgggcattgagggcc

SEQ ID NO: 215723 - DNA, 457 bp, Canis familiaris; identical to SEQ ID NO: 5616
  misc_feature (399)..(399): n is a, c, g, or t
  misc_feature (401)..(401): n is a, c, g, or t
  misc_feature (435)..(435): n is a, c, g, or t
  misc_feature (442)..(442): n is a, c, g, or t

SEQ ID NO: 215724 - DNA, 600 bp, Canis familiaris
  misc_feature (291)..(291): n is a, c, g, or t
  misc_feature (400)..(400): n is a, c, g, or t
  misc_feature (409)..(409): n is a, c, g, or t
  misc_feature (428)..(428): n is a, c, g, or t
  misc_feature (466)..(466): n is a, c, g, or t
  misc_feature (469)..(469): n is a, c, g, or t
  misc_feature (489)..(489): n is a, c, g, or t
  misc_feature (499)..(499): n is a, c, g, or t
  misc_feature (524)..(524): n is a, c, g, or t
  misc_feature (555)..(555): n is a, c, g, or t
  misc_feature (567)..(567): n is a, c, g, or t
  misc_feature (574)..(574): n is a, c, g, or t
  misc_feature (599)..(599): n is a, c, g, or t
agcagagcagaaggaacaaaggcacacactgaggcactaccagcacgtggctgctgtggatcctgagaaggcccagcagatgcgcttccaggtgcagacccatcttcaagtaattgaagagaggatgaaccagagcttggggctgcttgaccagaacccccgcctggctcaggagctgcggccccagatccaggagctcctccactctgagcacctgggtcccaatgaattggaagtccccgccccagggggcagcagtgaggacaagagtgggctgcagcctctggattncaaagatgcagacacccccgtggctctttcaaaagggtccacagaacaagatgctgcatcctctgggaaagaaaaaatgtcccccttggagcaataccaagcgaaaagngaatgtgtntggttccaaggggttttcntttcacttattcggagaattaaaaaagaaaacttggancanccgggaaagggttttcccanaggcccggtntggtttgttgatatgggaaaaaggnggggggtccctgatggcctttccttgtggtnttgggcaggaanaaacctntggggttttaaccatgggggggggng

SEQ ID NO: 215725 - DNA, 462 bp, Canis familiaris; identical to SEQ ID NO: 5618

SEQ ID NO: 215726 - DNA, 300 bp, Canis familiaris; identical to SEQ ID NO: 5619

SEQ ID NO: 215727 - DNA, 491 bp, Canis familiaris; identical to SEQ ID NO: 5620
  misc_feature (234)..(234): n is a, c, g, or t
  misc_feature (314)..(314): n is a, c, g, or t
  misc_feature (338)..(338): n is a, c, g, or t
  misc_feature (379)..(379): n is a, c, g, or t
  misc_feature (412)..(412): n is a, c, g, or t
  misc_feature (438)..(438): n is a, c, g, or t
  misc_feature (444)..(444): n is a, c, g, or t
  misc_feature (450)..(450): n is a, c, g, or t
  misc_feature (487)..(487): n is a, c, g, or t

SEQ ID NO: 215728 - DNA, 357 bp, Canis familiaris; identical to SEQ ID NO: 5621
  misc_feature (246)..(246): n is a, c, g, or t
  misc_feature (335)..(335): n is a, c, g, or t

SEQ ID NO: 215729 - DNA, 458 bp, Canis familiaris; identical to SEQ ID NO: 5622

SEQ ID NO: 215730 - DNA, 561 bp, Canis familiaris; identical to SEQ ID NO: 5623
  misc_feature (456)..(456): n is a, c, g, or t
  misc_feature (505)..(505): n is a, c, g, or t
  misc_feature (547)..(547): n is a, c, g, or t

SEQ ID NO: 215731 - DNA, 546 bp, Canis familiaris; identical to SEQ ID NO: 5624
  misc_feature (422)..(422): n is a, c, g, or t
  misc_feature (444)..(444): n is a, c, g, or t
  misc_feature (454)..(454): n is a, c, g, or t
  misc_feature (495)..(496): n is a, c, g, or t
  misc_feature (503)..(503): n is a, c, g, or t

SEQ ID NO: 215732 - DNA, 421 bp, Canis familiaris; identical to SEQ ID NO: 5625
  misc_feature (236)..(236): n is a, c, g, or t
  misc_feature (279)..(279): n is a, c, g, or t
  misc_feature (322)..(322): n is a, c, g, or t
  misc_feature (327)..(327): n is a, c, g, or t
  misc_feature (340)..(340): n is a, c, g, or t
  misc_feature (351)..(351): n is a, c, g, or t
  misc_feature (373)..(373): n is a, c, g, or t
  misc_feature (387)..(387): n is a, c, g, or t

SEQ ID NO: 215733 - DNA, 600 bp, Canis familiaris
  misc_feature (447)..(447): n is a, c, g, or t
  misc_feature (466)..(467): n is a, c, g, or t
  misc_feature (488)..(488): n is a, c, g, or t
  misc_feature (572)..(572): n is a, c, g, or t
atgccaatcctagtgatgcttctgttatttttaatatggaaggaactgaaccaaaacagttatcaaattttatctcaccattttatatttgacttgctgattcatgagtaatgattgttgatgaatatacatttgcttgactcactaatggggacagttgtaaagcagatatatgctagatttttacttccaacattatgtttttagcaggttgtcaatgaaaccatctctattgatcttttaccccagaattgactaggttttgctgaactgactgggtgtttgtaaacatgaccttaaccagtgactaaaatgtcagatggctgctgtattattcagttggtgtatgttgaatatacatgtctcccttatgtttttaattgggtatgcaaaaaatggttaatttaagtagactaaaaattttaatattttacctggataacccancaccaaaactaataagtgnnccattccaatttgaagtagcntcatccattaatttactttttggatatcaggctttcaatttttttatataatattaaaaccatcccatttaaaaatgacagagngggtcacttggcttaaactgaccaaaat

SEQ ID NO: 215734 - DNA, 448 bp, Canis familiaris; identical to SEQ ID NO: 5627
  misc_feature (368)..(368): n is a, c, g, or t
  misc_feature (387)..(387): n is a, c, g, or t
  misc_feature (395)..(395): n is a, c, g, or t
  misc_feature (401)..(401): n is a, c, g, or t
  misc_feature (416)..(416): n is a, c, g, or t
  misc_feature (423)..(423): n is a, c, g, or t

SEQ ID NO: 215735 - DNA, 600 bp, Canis familiaris
  misc_feature (366)..(366): n is a, c, g, or t
  misc_feature (386)..(386): n is a, c, g, or t
  misc_feature (501)..(501): n is a, c, g, or t
  misc_feature (529)..(529): n is a, c, g, or t
  misc_feature (557)..(557): n is a, c, g, or t
  misc_feature (589)..(589): n is a, c, g, or t
caagaggatgaaatttttgacagaacttatttgcaaaccatatgtctgatcaaacttgactatataaagtcaacagtaaaaaacccatccaatcgaaaatgagcaaaagacgcgaatagacatttcactaaagaggatgtatggatggcaagtaagcacatgaagagatgttgaacttgagtagtcatcagggaacgcaaatgaaaaccacaatgaattatgattacatgcttatcagaatggctaaagaaaaaatagcaaaaataccagatgctgtcgagtgtacaaactggatctctcgtaccttacttataggaatgttaaatggtacagctactctacaaaagagtttgggaatttctaatnaagtcaaacatccttgtatnatacaccccacgattacactcctgggtatttatcccaaataatggggaagcttttgttggcccaaaaatttgcccaccaatatttttagaggtttttttgtataagttaaaactnggaataccccaatgtctgcattcgaggnggggtcaaaccaaaatttgactgggggncctactttcaatggggggaacggccacttttnttacaaacttg

SEQ ID NO: 215736 - DNA, 480 bp, Canis familiaris; identical to SEQ ID NO: 5629
  misc_feature (291)..(291): n is a, c, g, or t
  misc_feature (336)..(336): n is a, c, g, or t
  misc_feature (350)..(350): n is a, c, g, or t
  misc_feature (378)..(378): n is a, c, g, or t
  misc_feature (391)..(391): n is a, c, g, or t
  misc_feature (434)..(434): n is a, c, g, or t
  misc_feature (441)..(441): n is a, c, g, or t
  misc_feature (457)..(457): n is a, c, g, or t
  misc_feature (465)..(465): n is a, c, g, or t

SEQ ID NO: 215737 - DNA, 382 bp, Canis familiaris; identical to SEQ ID NO: 5630

SEQ ID NO: 215738 - DNA, 468 bp, Canis familiaris; identical to SEQ ID NO: 5631
  misc_feature (67)..(67): n is a, c, g, or t
  misc_feature (305)..(305): n is a, c, g, or t
  misc_feature (410)..(410): n is a, c, g, or t
  misc_feature (445)..(445): n is a, c, g, or t
  misc_feature (459)..(459): n is a, c, g, or t
  misc_feature (466)..(466): n is a, c, g, or t

SEQ ID NO: 215739 - DNA, 180 bp, Canis familiaris; identical to SEQ ID NO: 5632

SEQ ID NO: 215740 - DNA, 649 bp, Canis familiaris; identical to SEQ ID NO: 5633
  misc_feature (489)..(489): n is a, c, g, or t
  misc_feature (493)..(493): n is a, c, g, or t
  misc_feature (524)..(524): n is a, c, g, or t
  misc_feature (583)..(583): n is a, c, g, or t
  misc_feature (615)..(615): n is a, c, g, or t
  misc_feature (625)..(625): n is a, c, g, or t
  misc_feature (647)..(647): n is a, c, g, or t

SEQ ID NO: 215741 - DNA, 343 bp, Canis familiaris; identical to SEQ ID NO: 5634

SEQ ID NO: 215742 - DNA, 449 bp, Canis familiaris; identical to SEQ ID NO: 5635
  misc_feature (359)..(359): n is a, c, g, or t
  misc_feature (404)..(404): n is a, c, g, or t
  misc_feature (412)..(412): n is a, c, g, or t
  misc_feature (432)..(432): n is a, c, g, or t
  misc_feature (443)..(443): n is a, c, g, or t

SEQ ID NO: 215743 - DNA, 576 bp, Canis familiaris; identical to SEQ ID NO: 5636
  misc_feature (391)..(391): n is a, c, g, or t
  misc_feature (439)..(439): n is a, c, g, or t
  misc_feature (452)..(452): n is a, c, g, or t
  misc_feature (471)..(471): n is a, c, g, or t
  misc_feature (493)..(493): n is a, c, g, or t
  misc_feature (505)..(505): n is a, c, g, or t
  misc_feature (542)..(542): n is a, c, g, or t
  misc_feature (572)..(572): n is a, c, g, or t

SEQ ID NO: 215744 - DNA, 600 bp, Canis familiaris
  misc_feature (392)..(392): n is a, c, g, or t
  misc_feature (416)..(416): n is a, c, g, or t
  misc_feature (467)..(467): n is a, c, g, or t
  misc_feature (510)..(510): n is a, c, g, or t
  misc_feature (538)..(538): n is a, c, g, or t
  misc_feature (544)..(544): n is a, c, g, or t
  misc_feature (573)..(573): n is a, c, g, or t
  misc_feature (577)..(577): n is a, c, g, or t
  misc_feature (585)..(585): n is a, c, g, or t
ttttatttgatttttaaccacttcccatgtgttgatacataacaccttttgcattatttcttatgttttgagaagaaaaatagctttttatactttttagttttgatttcggtaactagtttaactacaggtaaccttcaaagggaccattgtacattttgaacaatagacagagatggtatcacgaggactcttcttgaaatatggaaatcccgtctggagatcagtggccacgttaccacaggccctggttcatattttcatcaatctaaggtgcagtttctaaatttgtaagagtaggtgtaaaaaaaaaaagtgcttcttatctttgttaacattgtattttttttttcttgatgtatttctctcttgattactcatgtttatgttgngagcacatggaaacagtgatgctnatgcatggctagttgcctttttaagattggtgacaccagacttaccttttnaagcttaatataaagacaattttactgggaaatactactgggnactattggaaaaaggacttttgggattnaacaangggtggattggaactttaatttgtaatgngganattaatancttttgaagggggtt

SEQ ID NO: 215745 - DNA, 441 bp, Canis familiaris; identical to SEQ ID NO: 5638
  misc_feature (372)..(372): n is a, c, g, or t
  misc_feature (381)..(381): n is a, c, g, or t
  misc_feature (414)..(414): n is a, c, g, or t
  misc_feature (417)..(417): n is a, c, g, or t
  misc_feature (440)..(440): n is a, c, g, or t

SEQ ID NO: 215746 - DNA, 537 bp, Canis familiaris; identical to SEQ ID NO: 5639
  misc_feature (221)..(221): n is a, c, g, or t
  misc_feature (264)..(264): n is a, c, g, or t
  misc_feature (273)..(274): n is a, c, g, or t
  misc_feature (426)..(426): n is a, c, g, or t
  misc_feature (481)..(481): n is a, c, g, or t
  misc_feature (484)..(484): n is a, c, g, or t
  misc_feature (510)..(510): n is a, c, g, or t
  misc_feature (516)..(517): n is a, c, g, or t

SEQ ID NO: 215747 - DNA, 477 bp, Canis familiaris; identical to SEQ ID NO: 5640
  misc_feature (318)..(318): n is a, c, g, or t
  misc_feature (386)..(386): n is a, c, g, or t
  misc_feature (388)..(388): n is a, c, g, or t
  misc_feature (403)..(403): n is a, c, g, or t
  misc_feature (446)..(446): n is a, c, g, or t
  misc_feature (458)..(458): n is a, c, g, or t

SEQ ID NO: 215748 - DNA, 600 bp, Canis familiaris
  misc_feature (430)..(430): n is a, c, g, or t
  misc_feature (442)..(442): n is a, c, g, or t
  misc_feature (454)..(454): n is a, c, g, or t
  misc_feature (466)..(466): n is a, c, g, or t
  misc_feature (489)..(489): n is a, c, g, or t
  misc_feature (494)..(494): n is a, c, g, or t
  misc_feature (502)..(502): n is a, c, g, or t
  misc_feature (518)..(518): n is a, c, g, or t
  misc_feature (540)..(540): n is a, c, g, or t
  misc_feature (548)..(548): n is a, c, g, or t
  misc_feature (560)..(560): n is a, c, g, or t
ttttgtttagaagtgtgcgcagtgccatactgtggaaaagggaggcaagcacaagactgggccaaacctccacggtttatttgggcggaagaccggtcaggcccctggattttcttacacggatgccaacaagaacaaaggcatcacctggggagaggagaccctgatggagtatttggagaatcccaagaagtacatccctggaacaaaaatgatcttcgctggcattaagaagacaggggaaagagcagacttaatagcttatctcaaaaaagctactaaggagtaatagttggctatcgccttatttattacaaaacaaaaatgtctcatgactttttttttatgtgtaccatatttaaattgatctcattgaccagaattcaaatcatgagtggctgatagaaaggtctttttggacagtcctganttaaataaaatngctttgggggtnaaagaatttgancaagttttttgaactttgatagnaattntggttaanaagggcttttacttgntttcccttttaaaaaaatgatnggaatggnttaaaatgtgtngcttttacagaatgggaaagcccctttaatttataatggt

SEQ ID NO: 215749 - DNA, 470 bp, Canis familiaris; identical to SEQ ID NO: 5642
  misc_feature (440)..(440): n is a, c, g, or t
  misc_feature (450)..(450): n is a, c, g, or t
  misc_feature (456)..(456): n is a, c, g, or t

SEQ ID NO: 215750 - DNA, 529 bp, Canis familiaris; identical to SEQ ID NO: 5643
  misc_feature (344)..(344): n is a, c, g, or t
  misc_feature (409)..(409): n is a, c, g, or t
  misc_feature (439)..(439): n is a, c, g, or t
  misc_feature (465)..(465): n is a, c, g, or t
  misc_feature (485)..(485): n is a, c, g, or t
  misc_feature (497)..(497): n is a, c, g, or t
  misc_feature (506)..(506): n is a, c, g, or t

SEQ ID NO: 215751 - DNA, 469 bp, Canis familiaris; identical to SEQ ID NO: 5644
  misc_feature (134)..(134): n is a, c, g, or t

SEQ ID NO: 215752 - DNA, 438 bp, Canis familiaris; identical to SEQ ID NO: 5645
  misc_feature (290)..(290): n is a, c, g, or t
  misc_feature (392)..(392): n is a, c, g, or t
  misc_feature (424)..(424): n is a, c, g, or t

SEQ ID NO: 215753 - DNA, 453 bp, Canis familiaris; identical to SEQ ID NO: 5646
  misc_feature (419)..(419): n is a, c, g, or t
  misc_feature (439)..(439): n is a, c, g, or t

SEQ ID NO: 215754 - DNA, 600 bp, Canis familiaris
  misc_feature (385)..(385): n is a, c, g, or t
  misc_feature (446)..(446): n is a, c, g, or t
  misc_feature (448)..(448): n is a, c, g, or t
  misc_feature (459)..(459): n is a, c, g, or t
  misc_feature (471)..(471): n is a, c, g, or t
  misc_feature (498)..(498): n is a, c, g, or t
  misc_feature (505)..(505): n is a, c, g, or t
  misc_feature (525)..(525): n is a, c, g, or t
  misc_feature (531)..(531): n is a, c, g, or t
  misc_feature (548)..(548): n is a, c, g, or t
  misc_feature (555)..(555): n is a, c, g, or t
  misc_feature (570)..(570): n is a, c, g, or t
  misc_feature (580)..(580): n is a, c, g, or t
  misc_feature (594)..(594): n is a, c, g, or t
ttgatgtccaagacatcactaaaatatttcagtttaaagaccatatgtggtgttaatggactgtggtgcttctactatttaaaaacaactttcatacttcagatgtttttgagaagaggggaatgtagaggaggaggcagaacagggaggagttgtttgaatgagttacagtcttcatgtctgttctgttcagagggggcacttccaaggggagccttagatggagccttctaagagaaggcaggaagttgtgagtatattgtgtgtatcatgagggaatgaactcttcatcaagataggattgtgaaggctgaactataaaactcagcagtgacaggatcctcagataacaattcttggtgacagagtaatacagctgggctgntttttaaaaatataaacacaaaccatttttattttttgattattacattaaaagtataagngnatcttatgtgncccgggctgggnaggcttttttttttttttttaaagggnatggggntaatttaaggtaactttggncctaanaaaatgaattgggaccnttccctnaaagggtaatagggnaaaaaaagtnccattcatcctttnggtttg

SEQ ID NO: 215755 - DNA, 600 bp, Canis familiaris
  misc_feature (386)..(386): n is a, c, g, or t
  misc_feature (424)..(424): n is a, c, g, or t
  misc_feature (441)..(441): n is a, c, g, or t
  misc_feature (467)..(467): n is a, c, g, or t
  misc_feature (470)..(470): n is a, c, g, or t
  misc_feature (497)..(497): n is a, c, g, or t
  misc_feature (526)..(526): n is a, c, g, or t
  misc_feature (539)..(539): n is a, c, g, or t
  misc_feature (585)..(585): n is a, c, g, or t
  misc_feature (593)..(593): n is a, c, g, or t
gcaagagctgcgtcgacatggtcatgaagtggctggtgcctgagagcagtggccgctatgtcaataggatgaccaacgaggcgctgcataaaggtaggctccatgacctgttgacggtcagaactaaggcccttatctggtgctatgccaggcctagagcaggtgcgattcatatattcctgaatggagtccactggccatgctagtggataccaggtaactggggtgaaggaagggctggctcagaggggacctggcaggtgtggcacctggggacccccagccagtccattcatttgctctgtagatgtctactgggtggctgcaggtgggaggcccacagggtaactcaaggtcactgccttctggaacctggggcccaagtncagtcaggggaaaaaggaccccttgccccaccaagctngggctggaaacttccanggttaacccttgacccttccttgaanggngcttacttgaaggttttggcggcaagngagcgatcccatggattggctttgagggnccggccgttttgnaattattcaaatacttccgggctgggagtggccgcttcttggagcnttcccggntggcggc

SEQ ID NO: 215756 - DNA, 463 bp, Canis familiaris; identical to SEQ ID NO: 5649

SEQ ID NO: 215757 - DNA, 504 bp, Canis familiaris; identical to SEQ ID NO: 5650
  misc_feature (417)..(417): n is a, c, g, or t

SEQ ID NO: 215758 - DNA, 600 bp, Canis familiaris
  misc_feature (315)..(315): n is a, c, g, or t
  misc_feature (352)..(352): n is a, c, g, or t
  misc_feature (380)..(380): n is a, c, g, or t
  misc_feature (394)..(394): n is a, c, g, or t
  misc_feature (430)..(430): n is a, c, g, or t
  misc_feature (434)..(434): n is a, c, g, or t
  misc_feature (481)..(481): n is a, c, g, or t
  misc_feature (493)..(493): n is a, c, g, or t
  misc_feature (504)..(504): n is a, c, g, or t
  misc_feature (516)..(516): n is a, c, g, or t
  misc_feature (543)..(543): n is a, c, g, or t
  misc_feature (550)..(550): n is a, c, g, or t
  misc_feature (553)..(553): n is a, c, g, or t
  misc_feature (592)..(592): n is a, c, g, or t
gggcaggggctggggactcatacccctgagaacagatggcttgttgggtgtacactggttacacggtgggaaactcaggagtacctttgccttcagggggaatgcggggccggaccctgaatcctcggaccatttacccagtgttgccaagactccttgctctcctgcccttgtcctgtcagaagcgatttcactgcataagctacagccaggacctctcggcagacactgctgaatttccagagaagatgagtaatgggatgttgaagaacagcagagatgaggccgtggcagtgcctgaagaaagctcagctnaccaggggaacaggcccaccttcattcttcaaaaganctcacttgtgatctgggctcaagatccnatgctagaaggcantctgtatataagatgagtaaaatgatgtaccatgtngggncatcaaaggctggttatttagcccaccaaagaccttgtttttaggtntttggcttgaanaaaaactttcntttacgggaagnttaaggcaggaaaagggttttacttgnccttggnagnttttttttaaagaacagctttgggggaaaggatttgttnaaaggggt

SEQ ID NO: 215759 - DNA, 487 bp, Canis familiaris; identical to SEQ ID NO: 5652
  misc_feature (421)..(421): n is a, c, g, or t
  misc_feature (430)..(430): n is a, c, g, or t
  misc_feature (454)..(455): n is a, c, g, or t
  misc_feature (475)..(475): n is a, c, g, or t
  misc_feature (481)..(481): n is a, c, g, or t

SEQ ID NO: 215760 - DNA, 454 bp, Canis familiaris; identical to SEQ ID NO: 5653
  misc_feature (88)..(88): n is a, c, g, or t
  misc_feature (221)..(221): n is a, c, g, or t
  misc_feature (291)..(291): n is a, c, g, or t
  misc_feature (304)..(304): n is a, c, g, or t
  misc_feature (364)..(364): n is a, c, g, or t
  misc_feature (371)..(371): n is a, c, g, or t
  misc_feature (410)..(410): n is a, c, g, or t

SEQ ID NO: 215761 - DNA, 494 bp, Canis familiaris; identical to SEQ ID NO: 5654
  misc_feature (183)..(183): n is a, c, g, or t
  misc_feature (205)..(205): n is a, c, g, or t
  misc_feature (224)..(224): n is a, c, g, or t
  misc_feature (317)..(317): n is a, c, g, or t
  misc_feature (336)..(336): n is a, c, g, or t
  misc_feature (366)..(366): n is a, c, g, or t
  misc_feature (385)..(385): n is a, c, g, or t
  misc_feature (404)..(404): n is a, c, g, or t
  misc_feature (418)..(419): n is a, c, g, or t
  misc_feature (441)..(441): n is a, c, g, or t
  misc_feature (445)..(445): n is a, c, g, or t
  misc_feature (448)..(448): n is a, c, g, or t
  misc_feature (478)..(478): n is a, c, g, or t

SEQ ID NO: 215762 - DNA, 400 bp, Canis familiaris; identical to SEQ ID NO: 5655

SEQ ID NO: 215763 - DNA, 600 bp, Canis familiaris
  misc_feature (401)..(401): n is a, c, g, or t
  misc_feature (423)..(423): n is a, c, g, or t
  misc_feature (432)..(432): n is a, c, g, or t
  misc_feature (448)..(448): n is a, c, g, or t
  misc_feature (451)..(451): n is a, c, g, or t
  misc_feature (475)..(475): n is a, c, g, or t
  misc_feature (492)..(492): n is a, c, g, or t
  misc_feature (500)..(501): n is a, c, g, or t
  misc_feature (541)..(542): n is a, c, g, or t
  misc_feature (584)..(584): n is a, c, g, or t
  misc_feature (596)..(596): n is a, c, g, or t
ttgcattctatggataaatactgggtaatgtgatttttttgggtctttgggtggttctatttttaattttttaggaaacctctgtagtgttttccacagtggctgcaccagtttgtattccctgcaacagtacacaagggttcctttttctgcacatccttgccaatgcctgttgtttcctgtgattttgtttttagctgttttgacaggtgtgaggtgatattagaatggactgagtttttaatcctgtccaatggatgatgatattacccctagatattatcatatttagtaattttattttgtttttctatgtgttaagccaagagtaataaatctctctgccccttatatgaccctcttcccttggcttgacttatcattatcttcgatctttttgnagtatgctggctaacttggtanggctactgncaaaagaaaccaaatnttntacacttttttggtaaaaaaaagntggaataaaaaatgggntttatttnngggcaaatggggtaggaaggttttaaaaagaaagggaatnntaattggggggtttaactggattgccaaaaaaaagtcctggntttaaaaatttnatta

SEQ ID NO: 215764 - DNA, 1089 bp, Canis familiaris; identical to SEQ ID NO: 5657

SEQ ID NO: 215765 - DNA, 1089 bp, Canis familiaris; identical to SEQ ID NO: 5658

SEQ ID NO: 215766 - DNA, 1032 bp, Canis familiaris; identical to SEQ ID NO: 5659

SEQ ID NO: 215767 - DNA, 561 bp, Canis familiaris; identical to SEQ ID NO: 5660

SEQ ID NO: 215768 - DNA, 478 bp, Canis familiaris; identical to SEQ ID NO: 5661

SEQ ID NO: 215769 - DNA, 600 bp, Canis familiaris
ctccggtgcataaaccagacctaccagctccagtacggccggagcctcgaggacgtcattcgctccgacacgtccttcatgttccagagggtgctggtgtcgctgtcggccggtggcagggatgaaggaaattttctggacgatgctctcatgagacaggatgctcaggacctgtatgaggctggagagaagaaatggggaacagatgaggtgaaatttctgactgttctctgctcccggaaccgaaatcacctgttgcatgtgtttgatgaatacaaaaggatatcacagaaggatattgagcagggtattaaatctgaaacatccggtagctttgaagatgctctgctggccatagtaaagtgcatgaggaacaaatctgcatactttgctgaaaggctttataaatctatgaagggcttgggaacagatgataacaccctcatcagggttatggtgtctcgagcggagatcgatatgatggacatccgggagagcttcaagaggctttacggaaagtctctgtactccttcatcaagggtgacacatctggagactacagaaaggttctgctcattctctgtggaggagatgattaa

SEQ ID NO: 215770 - DNA, 600 bp, Canis familiaris
ttgggagggtagccctgacgggagtacatatcacacattgactcggagatcccgatggaacacaacatgttggaagtgacaactgaacgcaccatattggattctgacattcccttagaggggttccttcatgaggcttagtgttctggagtccgtggggaaggaactagagaaacaaaaagccttcatgagccatcattgtcttgagttttcctggaggcttcttgaggtgtccctagtcccacacgcctcttgcaatgttgtcctccactcacggagcactggatggaagggactcagaggtgatccctaggctgttctttgaacagctttgaacagcttagggtgcctgtactatgcccaggcagacatcactaatcgatgacagagtctctccgacctcacaggccttccaaatatagtgctctaggcagctccattggccaccccactttggtccaacctctggactttgtgggtgaggagactgaggactaaagagagagtgactttttcaagttcacatagctatgcctaaaacctggcctccttgttctcaggccatggttctttccattatgccctcctgccttggttaac

SEQ ID NO: 215771 - DNA, 600 bp, Canis familiaris
agttctgactccgaaagctttaggccaggtagcgtagggcatgggaacaccaggcctaccaacccagagtgggggacatttgaagaggtgtcaggaagtgtgactccagggttaaagaatgagttccacacaggtaaactggtcacttctaaaggagagaaagagcttcttattggtaatgagaaggtcacctctggtagcacaaccaccactcgtcacgcatgctctaaaactgttactaagaccgttataggtccagatggtcgcaaagaagtgacaaaagaagaggtaaactccgaagatggttctgattgtggtgacttatcccatacttttgctggcagcctagatgatctccatgctaggcaccctgatctagagcgtttctttggcacctcaattgtcaaaacacctccaggtatatttttaccctcgcgtaaagagtttgaacataagacccacattatgggctcagattctgacatattcacaaacatagggacacctgagttcccttccagtggtaaaacttcaagtcacagcaaacaatttgtgaccagtagtacgacttacaacagaggagactccgcatttgaaagc

SEQ ID NO: 215772 - DNA, 600 bp, Canis familiaris
aatattgatggctacgtctacacctggaccaagaaccgaatgtggagaaagacccgctccactcaggttggaactaactgtgttggcacagaccccaccagaaattttgatgctggttggtgcaaaattggagcttctcggaacccctgtgatgaaacttactgtggacctgctgcagagtctgaaaaagagaccaaggccctggctaatttcatccgcagcaacctctcttccattaaagcatatctgacaatccactcatactctcaaatgatgctctacccttattcctatgattataaactcacagagaacaatgctgagttgaatgccctggctaaagctactgtaaaagaacttgccaccctgcatggcaccaagtacacatatggcccgggagctacaacaatctatcctgctgctgggggctctgatgactgggcttatgatcaaggaatcaaatattcctttacctttgaactccgggacaaaggcagatacggctttgccctccccgaatcccagattagtccaacctgtgaggagacactgttggccatcaagcaccttgccagatacgtcctgcaacatctgtactag

SEQ ID NO: 215773 - DNA, 434 bp, Canis familiaris; identical to SEQ ID NO: 5666

SEQ ID NO: 215774 - DNA, 318 bp, Canis familiaris; identical to SEQ ID NO: 5667

SEQ ID NO: 215775 - DNA, 330 bp, Canis familiaris; identical to SEQ ID NO: 5668

SEQ ID NO: 215776 - DNA, 372 bp, Canis familiaris; identical to SEQ ID NO: 5669

SEQ ID NO: 215777 - DNA, 229 bp, Canis familiaris; identical to SEQ ID NO: 5670

SEQ ID NO: 215778 - DNA, 933 bp, Canis familiaris; identical to SEQ ID NO: 5671

SEQ ID NO: 215779 - DNA, 600 bp, Canis familiaris
aagggtttggatagctatcaggaggccttgatacacatgcgtacaaacgtcaccatcatttctagcacgttgggacatgggatgggaggtcgatttgctttcttaatttcttgtcagtggcaagtctcacattatacacaaggggctgggggaactgtaaggatgaaagattttaaatattttttctctagggttcatgcccttgattgagtcagctggcttcttagcctgagctgggatctggatacacttttctgttgctgctagtgggtrrrtccattgggagtggaagttggtttatccagaggtcaatcaatgctccatttgtcagccctcccacacttgagcaggacaatagctagagttcagaatggtgccccgaggcactgagaaaatcccaaagtgccttccaaactatctaaaagttccattgtgctcagtagttttagcattaagtgtgctgatattatgatgttctaatttattttctcaatcttttaacacatgtgtaagacactgtgcaaattctttggaaatagggtaattcttttatggaatagtagccaactaactctgtcattaaacttatactttgaaaat

SEQ ID NO: 215780 - DNA, 600 bp, Canis familiaris
ttctgaatttgaaacaacatatttttatacttaatgaatcatatcttgtttttctctttccttgcatcttcatttgttttgttttgttttgtttggtataagaactaattatcaaaaggcatatttgaagggaaaggctaatgtgctacgtaaacctgattttacaaacagaacacacacagaagggtcaccagaggggagtattataaaaataagacaactacataataaagctttgtaaaaaaaaaatatatgaggtattccctgtatgtccatgattctttatggaatataaagtgagcatgaagagtagttagaacttttaggtgcctgtggagttctaagagccgtattttatgccttgcattcatcagatgtgattcagaagtggacattctcttttagggtttgtctcattactggaaaaatttaaatgacacctggtttataaaatagccaaaagtgatggaattttattccatttgtcttaggaatgccccataatgcttgtttttcttacaggggactagcaactttctccacttaaagactaaatacctctttatatgctgtaaatcattctaactcattttaaagtct

SEQ ID NO: 215781 - DNA, 600 bp, Canis familiaris
ggcgccgtggggacgcacctcccggcgtccggcttggacatcttcggggacctgaggaagatgaacaagcggcagctctattaccaggttttaaactttgccatgatcgtgtcttctgcgcttatgatctggaaaggcttgatcgtcctcaccggcagtgagagcccgatcgtggtggtgctcagtggcagtatggagcccgcctttcacaggggcgaccttttgttcctgacaaacttccgggaagaccctattagagctggcgaaatcgtggtctttaaagtcgaaggacgagacattccaatagttcacagagtgatcaaagttcatgaaaaagataatggagacatcaaatttctgactaaaggagacaataatgaagttgacgacagaggcttgtacaaagaaggccagaactggcttgagaagaaggatgtggtgggaagagccagagggtttttaccatatgttggtatggttaccataataatgaacgactatccaaaattcaagtatgctcttttggctgtaatgggtgcatatgtgttactaaaacgtgaatcctaaaaagagaagaagttcctgagaccagattgaaat

SEQ ID NO: 215782 - DNA, 600 bp, Canis familiaris
cgcgcagccgaggacccggtggccgaggcgccgcgccccttccccgccagcggccgcctgacgctcagcgtggagctgcggctgccctcgctgctgctgctgcacgtgtgcgcgcgcccggagaagccgccgggaccggcaagtgacccggctccgtgccctgcccttgacccgtgggcaggtgcttttggtgtggtcggatgagcgcgtgggctccaagtgcctgtggacctatgagatccagttctccgcggatggagaagtgtacacgcccatcagcaggaagccatccacctttaacctgtttgtgttcagcccagagtcagccgtcacctctggctcctaccgggttcgagcggtggactactgggcccgaccgggccccttctcgacccgcgtgcactacgtggaggtccctgcaccgtcagggccgccgcggcccagtgactgtgagcggtgctgacctcggagccgcggaggccaggcgctgagatgggcctccaaggaaggccctcgtccgccggggatggacgcagcccgtccgtgggctccgctccttctgtgctgtctcactcccttaaagtgcctttgcgctcacca

SEQ ID NO: 215783 - DNA, 296 bp, Canis familiaris
atgcggccccccggcccccgcgcccccgggctggcgctgctggccgcgctgctggcggcgccccgggccctcgcagaggccccgcacctggtgctcgtggacgcggcccgcgcgctgcggcccctgcggcccttctggaggagcaccggcttctgcccccccctgccgcacagccaggctgaccgctatgacctcagctgggaccagcagctcaacctggcctatgtgggtgctgtccctcacgggggcatcgagcaggtccggacccactggctgctggagctcatcacggccag

SEQ ID NO: 215784 - DNA, 600 bp, Canis familiaris
ataaagcagagagatgtggagccgagcacacagcatccttctttcaaaaagtacaatcagaaaagagagttttaccttacagggctgtgaagataagtgaaaatcagacggaattctactgtgaataatatgatatgtggcaaaggaactctactcttggtatagttaggagaagattttaatccaaaggctttgcatctgtacggaggaccgaggagatactgaaagagatttgcagatccactgttttttaggcaggaagaatgctcgttaaatgcagaacgctgctctggctcatgtgtttgctccgaggtgtaggttttgttcgactgacgtatcagatagtcagagtggttaccacaccgacgttgtagcagctgcataataaatgactgagagaatcatgttaggcatgcccacctaacctaacttgaatcatgcgaaaggggagctgttggaattcaaatagactttctggttcccagcagtcggcagtaatagaatgctttcaggaagatgacagaatcaggagaaagatgctgttttgcactatcttgatttgttacagcagccaacttattggcatgatggagtgacagg

SEQ ID NO: 215785 - DNA, 183 bp, Canis familiaris; identical to SEQ ID NO: 5678

SEQ ID NO: 215786 - DNA, 114 bp, Canis familiaris; identical to SEQ ID NO: 5679

SEQ ID NO: 215787 - DNA, 366 bp, Canis familiaris; identical to SEQ ID NO: 5680

SEQ ID NO: 215788 - DNA, 1400 bp, Canis familiaris
accccgagatggtgtttgctcgtaccagtccccagcagaagctggtgatcgtggagagctgccagagactgggtgccatcgtggccgtgaccggggatggggtgaacgactccccagccctgaagaaggccgacatcggcgtggccatgggcattgccggctcggacgctgccaaaaatgcagcggacatgatcctgctggatgacaactttgcctccatcgtgacaggcgtggagcagggccggctgatctttgataacctgaaaaagtccatcgcctacacgctgaccaagaacatccccgagctgacgccctacctcatctacatcaccgtcagcgtgcccctgcccctcgggtgcatcaccatcctcttcatagagctctgcaccgacattttcccgtcggtgtccctggcgtatgagaaggcggagagtgacatcatgcacctgcgcccacggaacccaaagcgagaccgattggtcaacgagcccctggctgcctactcctacttccagatcggtgccatccagtcatttgctggcttcacggactacttcacggccatggcccaggagggctggttcccgttgctgtgtgtggggctgcggccgtactgggagaaccaccacctacaggatctgcaggacagctacggccaggagtggacattcgggcagcgcctgtaccagcagtacacctgctacaccgtgttcttcatcagcatcgagatgtgccagatcgctgacgtcctcatccgcaagacacgccgcctgtctgccttccagcagggcttcttcaggaacaggatcctggtgatcgccatcgtgttccaggtctgcatcggctgcttcctgtgctactgccccggaatgcccaacatcttcaacttcatgcccattcggtaccagtggtggctggtccccatgccctttggcctcctcatcttcgtctatgatgagattcggaaacttggagttcgctgttgcccagggagctggtgggatcaggagctctactattagaggaaccatccctgcaccccccgcagcagaggtggggggcatgggacccgctgggccgccactggaacatcaaagcgaccaggagccctggcacctgtgtcagctcctgcagcccacggcgccccgaccttggagggccctccccgctccccttccccatccacagagagcccaccccgtcagggcggtccctgggccaggtcctggtctgaagagtggggagggggggtgttggcaggagtggggcgctggctgttcctgtgaggcgggtctgcactcggggtgcccagagggctccccagggtactgcttcaatacacacctgtgccgcgtgatagtaataaaccagctacactgacgaaaaaaaaaaaaaaaaaa

SEQ ID NO: 215789 - DNA, 600 bp, Canis familiaris
atttgtgacagccgggtcctggagagatacatcctggaggccagggaggccgaaaatgtcacgatgggctgtgctcaaggctgcagcttcagtgagaatatcaccgtcccagacaccaaggttaatttctatacctggaagaggatggatgttgggcagcaggccttggaagtctggcagggcctggcactgctctcagaagccatcctgcggggtcaggccctgttggccaacgcctcccagccatctgagactccgcagctgcatgtggacaaagccgtcagcagcctgcgcagcctcacctctctgcttcgggcgctgggagcccagaaggaggccatgtcccttccagaggaagcctctcctgctccactccgaacattcactgttgatactttgtgcaaacttttccgaatctactccaatttcctccgtggaaagctgacactgtacacaggggaggcctgcagaagaggagacaggtgaccaggtgctcccaccccaggcacatccaccacctcactcactaccactgcctgggccacgcctctgcaccaccactcctgacccctgtccaggggtgatctgctcagcaccagc

SEQ ID NO: 215790 - DNA, 600 bp, Canis familiaris
gctcgtggctctaccagaggaatgagccagccgcccgccccgtcttcctcatgtacatctcccagagccgggccaagccggccgagggcctggacaccaagcacatctccggccagaagaagaccgacagcacctacagcctcaccctgagccgcttccgcaaggaggacgagggctactatttctgctctgtcctgagcaactccattctgtacttcagccccttcgtgccggtcttcctgccagtcaagccccccactacgccggcgccgcggccacccacgcgggcgcccaccaacgcgtccaagccggtgtctccgcgcggggagacctgccggcctgcggcgggcagcgcagtgaaaacaagtgggttagacttcgcctgtgaaatctacatctgggcacccctggctgggacctgcgccgtccttctcctgtcactggtcatcaccatcatctgcaaccacaggaacagaagacgtgtttgcaaatgtcccaggcccgtggtcagaccaggaggcaagcccagtccttcagagaaatatgtctaacatggagatggatcctgtgtggcagccactacaagaccaaatagaattc

SEQ ID NO: 215791 - DNA, 163 bp, Canis familiaris; identical to SEQ ID NO: 5684

SEQ ID NO: 215792 - DNA, 174 bp, Canis familiaris; identical to SEQ ID NO: 5685

SEQ ID NO: 215793 - DNA, 600 bp, Canis familiaris
catggttccaactaccattgggggaaagatcgtgggttccctgtgtgcaattgcaggtgtgttaaccattgccttaccggtccccgtcatagtgtccaacttcaactacttctaccaccgggagacggagggggaggagcaggcccagtacctgcaagtgacgagctgcccaaagatcccatcctcccctgacctgaagaaaagtagaagtgcctctaccattagtaagtctgattacatggagatccaggagggagtaaacaacagtaacgaggactttagagaggaaaacttgaaaacggccaactgcactttggctaatacaaactatgtgaatattaccaaaatgttaactgatgtctgattgaaacctattaacgtactctcagctccatggaactaatgcagatactgcataatagcctgcattgtagtaacatgttctacagtgtgtatctggttctgcatggaaagcaatagtcgtgcaagtgacttttgatcttttgcatttttgatttagaacacagaatatctatccatggctttcatgcaatcttcatcaccggcttagggtttcaacagggagtcacagtgagcaga

SEQ ID NO: 215794 - DNA, 587 bp, Canis familiaris; identical to SEQ ID NO: 5687

SEQ ID NO: 215795 - DNA, 389 bp, Canis familiaris; identical to SEQ ID NO: 5688

SEQ ID NO: 215796 - DNA, 229 bp, Canis familiaris; identical to SEQ ID NO: 5689

SEQ ID NO: 215797 - DNA, 600 bp, Canis familiaris
tgtggcttgagaaaaacttgtggaaaataggtcttagcatgctaacaatagagagaactgggggcattatttacctcaggcccctcattttatagaagggattaaacttctacaatgtgccagacactttgcctccattatttcatgacaccctgagactgagcctgggaggtagaccttcccaccttgcagaagatgagaccgaggcccagagaggtcaagtgatttggctgagatctgaaaatcccagcagtgacaagagtaatcaacacgagcttatcataggaatcggatctatctttctatctgtctctctatctacctacctatcactcctccccttctctacctccacctctaacttcatctcatccctaccatgtacctcaaacagtagaagtctggaggaataggaataggaataggaataggaataggaataggaataggaataggaatgttgggtcacaatagtacccttgctgacctctgagtgggcatctctctttcctggcctcagtgtgtgacctggtgagctgtgacctgcccccggtgcctccctgcgaagatggtctccagatgaccctgaccaatcctggt

SEQ ID NO: 215798 - DNA, 102 bp, Canis familiaris; identical to SEQ ID NO: 5691

SEQ ID NO: 215799 - DNA, 600 bp, Canis familiaris
gggttgagaatggatggcatgggaaatatccgcagtcaccaaaagaagactctcattcaacagcagggacagctgccacagcccaagacagccatccagatcaaaaaacgacaacgcagagtcaagaggacagctcctggacttatttctttgacccaatctcacatccaatgggaccaggtcatcaaacggaaagatggatggatatggactccagccatagtcccacaagtcagccttctgcagatccgaacacacatttggtggaagacttggacaggataggacctctttcaatgacgactcagcaaagtcatactcagagcttctccacatcacctggaggcttggaagaagataaaaaccatccaacggcttctactccaactagcaatagaactgatggcagaggtggaagagaaggtggacatcttcccgaagactcagctccttcagtggaagcttctccttctcactcgccagccacaaatgaatacaggaccctcatcccggtgacccccgctaagacggggttccctggagttactgaagttaatattgctggagattccaattctaacgttattcatttcctttcag

SEQ ID NO: 215800 - DNA, 156 bp, Canis familiaris; identical to SEQ ID NO: 5693

SEQ ID NO: 215801 - DNA, 305 bp, Canis familiaris; identical to SEQ ID NO: 5694

SEQ ID NO: 215802 - DNA, 600 bp, Canis familiaris
aatcaggttgtaaccaggactgtttactgaatagctagctacttgattcctttctcttccccacacactccatgagcactcagaagaacccaatgctggagttagttgtatcttcaatgagtttgaacgttcattctggacattctcttctgtttagaagagaccaagtgaacctaccttcatttcaggaggaactggccacttgccatatgacaacattgtcagctcttcctacctggggttctggtaggtcctcaccgggccaataggggaataagagtgaggtgcagcaccccccccacacacacacacacacacacacacaccagacctcccaggaagcatatctacataagtgtggagggctgagagggattaaatagaagcacccctcctcgcttccatacagctctgcagagcaaattaacttgagtttattatcttatcttctggttttattgcataaatatttatttttttaagtgtaaagtaattttaccaaataatgcaaacataaggaaattgaggttagagttagagggaggtgcttaaagagaggtttatagggtagaagatttgatacgggagaggtcaaggtgc

SEQ ID NO: 215803 - DNA, 1400 bp, Canis familiaris
ccagttgaccctgccagccgcccagtgccctgatgactcgtctgtgaaatgccaagtgcagcatgcttccagccccagcaaggcagtgtctgtgccctgcaaaggtcagagggcaggctggggaggggcaggggccccacatcctcactctgaccctccacttggagttctggccccaaggacactccacggggaggacagtgggctgctgggctgagctcccagcaagtggccaaggtggggcctccatgaaggacctggagggtggcagggggcaggcaggcagagggtgcacactgacctgttccaatctctctctctctctctctctctctctctgctcctgaagataacagtcatccgtgtcatccatgtccctcgtgcaatgagccccgcctgtcactacagaagccagccctcgaggatctgcttttaggctccaatgccagcctcacatgcacactgagtggcctgaaagaccccaagggtgccaccttcacctggaacccctccaaagggaaggaacccatccagaagaatcctgagcgtgactcctgtggctgctacagtgtgtccagtgtcctaccaggctgtgctgatccatggaaccatggggacaccttctcctgcacagccacccaccctgaatccaagagcccgatcactgtcagcatcaccaaaaccacaggtgggcccagaccctgcccgtgaggcactgcttggcacacaaaagtttgtgaggcaactcctaagcctgcttccttcctctagcccctgggcttgggtgctcccacccacattttacaaagggaaactgtggcatggggtgctatggggaagaaggctcttcccccaccccagatccctgacctggctctctgtcctgcagagcacatcccgccccaggtccacctgctgccgccgccgtcggaagagctggccctcaatgagctggtgacactgacgtgcttggtgaggggcttcaaaccaaaagatgtgctcgtacgatggctgcaagggacccaggagctaccccaagagaagtacttgacctgggagcccctgaaggagcctgaccagaccaacatgtttgccgtgaccagcatgctgagggtgacagccgaagactggaagcagggggagaagttctcctgcatggtgggccacgaggctctgcccatgtccttcacccagaagaccatcgaccgcctggcgggtaaacccacccacgtcaacgtgtctgtggtcatggcagaggtggacggcatctgctactaaaccgcccaatcttccctccctaaataaactccatgcttgcccaaagcagccccgtgcttccatcaggccgcctgtctgtccatattcggggtctgtggcatactgaggcaggggtagagctc

SEQ ID NO: 215804 - DNA, 600 bp, Canis familiaris
cgggcccaggggaggtgggcgggcctcctgagccggagcctgggctgaccccacacctatccacaggcaagcgtgcccccccggatgtgtacttgttcctgccaccggaggaggagcaggggaccaaggacagagtcaccctcacgtgcctgatccagaacttcttccccgcggacatttcagtgcaatggctgcgaaacgacagccccatccagacagaccagtacaccaccacggggccccacaaggtctcgggctccaggcctgccttcttcatcttcagccgcctggaggttagccgggtggactgggagcagaaaaacaaattcacctgccaagtggtgcatgaggcgctgtccggctctaggatcctccagaaatgggtgtccaaaacccccggtaaatgatgcccaccctcctcccgccgccaccccccagggctccacctgctgggagggaggggggctggcaagaccctccatctgtccttgtcaataaacactccagtgtctgcttggagccctgggcacacccatttcttgggggtgggcagggttgcagagcagggatgtcttggcacagaagggtcccccagggtgt

SEQ ID NO: 215805 - DNA, 1370 bp, Canis familiaris; identical to SEQ ID NO: 5698

SEQ ID NO: 215806 - DNA, 1400 bp, Canis familiaris
ttgagtggtgaccgaagtagtagtctggtagtgtgagtggcagctgaagtttcagaagtgtcaggtgcaagagtagttggggaagaattaggtgtgggaattgggcagctgcgtgggatggaggctagtgtagttggcagaaggtataaattccgcttcctcgctcactgacgcgccgcgtcggtcgttcggctgcggcgacggtatcaggctcactcaaacggcggcggtaataccgtattccacagaagaaacccattgtctcacatccttttttaagaacagtttgtaacatgggcttattaaaccctgggaaccgcaagttgggcaaataaaggtcaacataataactcataccataagttttgcagaatatgtctatcagtcagcaacctctgagaactaccaaggctctgtctaggtcacataggtcatgactagcccacccacacctcctgcaactacaccagctccaccatcttcctagctccaccagagaccacagctgccccacccacactctgcaactacaccagctcacatttctagtccacagccacagtgcaataaatatcaggggataacgcaggtagaacatgtgagcaaaatgccagcaaaatacgtggatccaaagagttattttgaaccccagacctgcatctggattgtgggatagaggcatttttcttgttaataggtctgttgtggtgaataattagattgaaagattaatgaagtgcttaatcggtcaggcgtatcaggcgtttccccctggaatctccctcttcgctctcctgttccgaccctgccgcttaccggataactgaccgcactttccttcccttcagaagcgcctttctcatagctcacgctgtaggtatctcaggttaagttagtccgcgttcttaccacttatttccggcctatttgagtcatattaaaaagaaatgccagaaattttccggcattataggtcagacttgccagacaatatccatgcgatcacgttgactgactttacggagtttacaagaaatgctacggtaacctatatagttgccacctatgcgtcactaaaaaaagaggtaaatcgaaggaatcgaggactttataggtacattgagaactgagctggaaatgccctgagctggaaatgccgaaaatgttctagttacgatgccattggatatatcaaggtggtatatccagtgattttttctccattttagcttccttagctcctgaaaatctctgccaagctcctcgagaaaccacttgtctcacatccttgttttaagaacagtttgtaaccataaacttatttaaaaccctgggaaccgcaagtgggcaaacaaataaagaaccccggaacgggtgcggggtgttcaagaatgtccatt

SEQ ID NO: 215807 - DNA, 1400 bp, Canis familiaris
gttctccctggatgccccccacagcacctacaacctctactgccccttccgggtgggggagcgggcacggcaaattgaggccctcgcccagcagatcgccacgctgtgcgccacgctgcaggagtacccagccatccgctaccgcaagggcccagaggtcacggctcagctggccaatgccgtcctggccaagctgaatgccttcaaggctgacaatcccagtctgggagagggccccgagaaaacccgctcgcagctactcatcgtggaccggggggccgaccctgtgtccccgctgctgcatgagctcacattccaggccatggcctatgacctgctgaacatcgaacaggacacatataggtacgagaccacggggctgagtgaggcccgggaaaaggctgtgctgctggatgaggacgatgacctgtgggtagagctgcggcacatgcacatcgccgatgtgtccaagaaggtcacggagcttctaaagacgttctgtgagagcaagaggctgaccacggacaaggccaacatcaaagacctgtcccacatcctgaagaagatgccgcagtaccagaaggagttgaacaagtattctacgcacctgcatttagcggacgactgcatgaagcacttcaagggttcggtggagaagctgtgcggggtggagcaggacttggccatgggctcagacacagagggtgagaagatcaaggatgccatgaagctgatcgtgcctgtgctgctggatgcagccgtgccagcctatgacaagatccgggtcctgttgctctacatccttctgcggaacggtgtgagtgaggagaatctggccaagctgatccagcatgccaatgtgcaggcacacagcagcctcatccggaacctggagcagctggggggcacggtcaccaaccctgggggcccggggacctcaagccggctagagcggagggagcgcttggagcccacctatcagttgtcccgctggaccccagtcatcaaggacgtgatggaggatgccgtggaggaccggctggaccgcaagctctggcccttcgtgtccgaccccgcccccacgtccagctcccaggctgctgtcagcgcccgctttggccactggcataagaacaaggccggcgtggagatgcgggcagggccccggctcatcatctatgtcatgggcggcgtggcgatgtcagagatgagggctgcctatgaggtgaccagggccaccgatggcaagtgggaggtgctcattggctcctcgcacatccttacccccacccgcttcctggatgaccttaagacgctggaccagaagctggaggacattgccttgccttgaccgcccccactcccttcccagagaaataaattcctcccttctctctgcc

SEQ ID NO: 215808 - DNA, 578 bp, Canis familiaris; identical to SEQ ID NO: 5701

SEQ ID NO: 215809 - DNA, 600 bp, Canis familiaris
tattaacatgctgaacttcactcgactgatattttttttcttgattcccctgttcatcatgattgggtgctacttaatcatcattcatagtctccttcacgggaagacatctaagctgaaaccaaaagtcaaggagaagtctataaggatcatcatcacactcatggtacaggtgctcgtctgctttatgcctttccatatctgttttgctttcctgatgctggaaggggatgagaacagttacaatccctggggagcctttaccaccttcctcatgaatctcagcacctgtctggatgtgattctctactacattgtttcaaaacaatttcaggctcgagtcattagtgtcatgctctacagaaattaccttcggagtgtgcgcagaaaaagcttccgatcaggtagtttacggtcactaagcaatgtaaacagtgaaatgctttgaatgataagcaggtttctgtttttaatttctttatattcactttactaactatcctaaggtcactggatattctgtatgatattaccaagccccttctctcctgaaaaaaaaaaaaaaaaaaaaaaaaagaaacttaagaaacacttttgtgg

SEQ ID NO: 215810 - DNA, 594 bp, Canis familiaris; identical to SEQ ID NO: 5703

SEQ ID NO: 215811 - DNA, 91 bp, Canis familiaris
tggagggctggccaagcgctggttggttcctggctggaggttgggctggatcctcatccatgaccgaagagacattttgggcaatgagatc

SEQ ID NO: 215812 - DNA, 178 bp, Canis familiaris; identical to SEQ ID NO: 5705

SEQ ID NO: 215813 - DNA, 600 bp, Canis familiaris
tacttgaacttacactgggcaaatgttgtttactacagtccagatgaagttaaagtggtagcagaagggtttgatgcagcaaatgggatcaatatttcacctgataaaaagtacatctacgttgctgatatactggctcatgaaatccacgttttggaaaaacaccctaatatgaatttaacgcaattgaaggtacttaagttggatacactggtggataatttatctattgatccttcctcgggggacatcttggtaggctgtcatcctaatggccagaagctcttcatttatgacccgaacaatcctccgtcatccgaggttctccgcatccagaatattctatgtgagaagcctaccgtgactacagtttatgccaacaacggatctgttctccagggaagttctgtagcctcagtatatgataggaagctgctcataggcactttatatcacagagccctgtattgtgaactttgaattgtacttttggcatgcaagcgtgctaacttctttaacacttaattttctatgaattactaattttgtgggaatttaaccacgaaatgggcccagaaatgtctgcatgtatagttagct

SEQ ID NO: 215814 - DNA, 1400 bp, Canis familiaris
atctgagagatatctttttaaacaactggattctctatggctcctcgacagcagcagcactttcaccctggagcttcaggaggatgagatcttcacactcaccactctcactgtggggagcaagggtagctacccgctgcctcccaagtccgagcctttcccgcaaatttatgaagatgatttcgatgttgattacccattttttagtgaagctccgaatttcgctgatcagactggcgtctttgaatactttacgaacattgaagaccctggagagcatcgtttcacactgcgccaagttctcaatcagcggcccattacttgggctgctgatgcatacaataccatcagtattataggagattacaaatggtccaatctgactgtaaggtgtgatgtttacatagagactcctgagaagggaggcgtgttcattgccggaagagtaaataaaggtggtatcctgattagaagtgccagaggaattttcttctggatttttgcaaatggaacctacagagttacaggtgatctagctggatgggtcatatatgctttaggacgtgttgacgttacagcaaaaaaatggtatacgctcacgttaattattaagggccggctgtcctctggcatgctgaacggcaagactgtctggaagaacatccctgtgagttttccgaagaacggctgggccgccattggaactcactcctttgaatttgcacagtttgacaactttcatgtggaagccacgagataatattcacagagtaccctagaaccactctttggattttctttctttctttttggttttgattcagagccaattcttttggtggatcaatgtgtgagcctcttggaggccaacaatagtgaagagtaaatggggagagaactatatctttgtttgatcttctggaagatattcttagaagtaatgcccaggggaaccagatggatcttaaagattacccgatatgtcccctagaattcaagctgtgcagtggtcctattgttagaagagtggtttgggtggttcccacctcgaagccttggcattcatgctgagatggctctcttcctcgtacgtgcaagggattgtgctgactgcaggaacttgatcatcacaggaacggactgtgtgtctgagtgagcagatggcctcatcccgaggtaatgccacactatagggagctgaagaacactggaagtgctgctttttgaaaaccacttaaacacaataatcttacactctagagagtattttttcttttcctttatatgatgatgcttttaaattataaatatgatgagtggatgatttagaaaatgcctcattaataaactacctctcaagctatttctgcagtaataaatatgagcagattaaaaaaaaa

SEQ ID NO: 215815 - DNA, 600 bp, Canis familiaris
tatcttaatgacttggaccgcgttgctgaccccgcctacctgcctacgcaacaagatgtgcttagagttcgagtccccaccacagggatcatcgaatacccctttgacttacaaagtgtcattttcagaatggtcgatgtagggggccagaggtcagagagaagaaaatggatacactgctttgaaaatgtcacctctatcatgtttctagtagcgcttagtgaatatgatcaagttctcgtggagtcggacaatgagaaccgaatggaggaaagcaaagcactctttagaacaattatcacatatccctggttccagaactcttcggttattctattcttaaacaagaaagatcttctagaggagaaaattatgtattcccacctagttgactacttcccagaatatgatggaccccagagagatgcccaggcagctcgagaattcatcctgaagatgttcgtggacctgaacccagacagtgacaaaattatctactcccacttcacatgcgccacagacaccgagaacatccgctttgtctttgctgccgtcaaggacaccatcctccagttgaacctgaaggaatacaatctggtc

SEQ ID NO: 215816 - DNA, 1400 bp, Canis familiaris
accagagggcatctgggaaccagagccatgtggacccagaccctccgcctactgcccacaatagctcatctcgatttgactgcaactctgtctccacggctgcagtgctcctggcagacatcctccccaccctcatcatcaaactgctagctccccttggtctgcatctgctgccctacagcccccgagttcttgtcagtgggatttgtgccgctggaagcttcatcctggttgccttttctcattcagtggggaccagcctgtgtggtgtggtcttggctagcatctcgtcaggtgtgggagaggtcaccttcctctcactcactgccttctaccccagggctgtgatctcctggtggtcctcaggaactgggggagcaggactgatgggagcattgtcctatctgggcctcacccaggctggcctctcccctcagcacaccctactgtccatgctgggtatccccgccctgatgctggccagctatttctttttgctcacatctcctgagccccaggaccccggaggggaagaagaggcagagacatcagcgcggcagcccctgatagacagtgaaaccccagagtcgaagccagactccagctcaaacctctcccttcaggaaaggtggactgtgttcaagggcttgctatggtacattgtccccttggtcctagtttactttgcggagtatttcatcaatcaggggctgttcgagctcctgttcttccggaacacatccctgaatcatgctcagcagtatcgctggtaccagatgctctaccaggctggcgtctttgtttcccgttcttctctccattgctgtcgcatccgtttcacatgggtcctggccctgctgcagtgcctcaacctggccttcctgctggtggacgtgtggttcagcttcctgcccagcatctacctcgtcttcctgatcattctgtatgaggggctcctcggaggtgctgcctatgtgaacaccttccacaacattgccctggagacaagtgaccagcaccgggaatttgccatggcagctgcctgtatctccgacactttgggaatctccctgtcagggctcctggccctgcctctgcacgacttcctttgtcacctgtcttgacactctggcttcccaggacatggaaaacactaacctaggcctacactgacaggcgggcgagcgctggcgcacagcccagagcccactcaccagctctgcttcagacttcccaagggcaagcagcgggggcgtagagaagtgctcaggtcccatcccccctttgagcaagagcccacggtttttggctactcccaggctggcctcggggagtttcttcacagtgtgacttcctcacaataaatgcctgttttaccaattttaaaaaaaaaaaaaaaa

SEQ ID NO: 215817 - DNA, 83 bp, Canis familiaris
gccgacaatactctggtggcggtgaaatcttgccgagagaccctcccacctgacatcaaggccaagtttctacaggaagcgag

SEQ ID NO: 215818 - DNA, 819 bp, Canis familiaris; identical to SEQ ID NO: 5711

SEQ ID NO: 215819 - DNA, 869 bp, Canis familiaris; identical to SEQ ID NO: 5712

SEQ ID NO: 215820 - DNA, 600 bp, Canis familiaris
cctgggcctaatgggatgactggagcccctggtgttgctggagagcgtggagaaaagggagagcctggcgagaggggccccccaggacttccagcttctttagatgaagagctccaaaccacactccacgacctcagacatcaaatcctgcagaccatgggagtcctcagcttgcacgagtccctgctggtggtgggaaggaaggtcttctccagcaatgcgcagtccattaatttcaacgacattcaagagttatgtgccggggcaggcggccaaattgctgccccgatgagcccagaagagaatgaagccgttgcaagcattgtgaagaagtataacacttacgcctacctgggcctggtggagagccccgactctggagacttccagtacatggatggggcccctgtgaattacaccaactggtaccccggggagcccagaggtcggggcaaagagcagtgtgtggagatgtacacagatgggcagtggaataacaaaaactgcctgcagtaccgactggccatctgtgagttttgagcagcctctaaggccacagtagagataggccctgccttgctttcagcctccatcctgcag

SEQ ID NO: 215821 - DNA, 600 bp, Canis familiaris
aagcttcctcctcttcctggcagttcagctcctggggcagacgggcgctaaccccgtgtacggctctgtgtccaacgcagacctgctggatttcaagaacttgctggaccgcttggaggacaagatgcctttagaagatgaagccgagtctccccaagccctgagtgagcagaatgcggaagctggggcagctctcagccccctgcctgaggtgcctccctggacgggggaggtcagcccagcccagagagatgggggtgcccttgggcgcagcccctgggactcctccgatagatctgccctcctgaagagcaagctgagagccctgcttgctgcccctcggagcctgcggaggtccagctgcttcggaggcaggatggataggattggagcccagagcggactgggctgcaacagcttccggtactgaagataatggccagggaggaaaaggaggccctggccgggggcagactctgagagaccctcgtcccttggggtctctcactcaactttgtcccagctcattgccatcaagttgagccgtgacgagcaccgagaccgtattcaagctgcagcctcttggcgatgtttctcacg

SEQ ID NO: 215822 - DNA, 1400 bp, Canis familiaris
gctgctgactggagtgccccatccttggcttgtgcccggggccccgcattctggtgccaaagcctggagcaagcactgcagtgcagagccctgggtcactgtctacaggaagtctggggcaatgcaagagctgatgacctctgccaggaatgtcaggacatcgtccgcatcctcaccaagatgaccaaggaggccatcttccaggacatggtgcggaagttcctggagcatgagtgtgacgttctccccttgaagctgctcacaccccagtgccatcacatgcttggcacctacttcccagtggtggttgactacttccaaagccagattaacccaaagatcatctgtaagcacctgggcctgtgcaagcctgggcttccagagccagagcaagagtcagagctgtcagatccgctgctggacaagctgatcctccctgagctgcctggagccctccaggtgactggacctcatacacaggatctctctgagcagcagttgcccatccccctcccatactgctggctctgcaggactctgatcaagcggatccaagctatgattcccaagggtgtgctggctgtgactgtgggccaggtgtgccacgtcgtacccctggtggtgggcggcatctgccagtgtctcggcgagcgctacactgtcctgctcctggatgcgctgctgggccgcatgctgccccagctggtctgcggcctcgtcctccggtgctcccacgaggacagcgctgggccagctctggcgtctctgcccagtgaatggtcaccccaagagtccaagtgccagctctgcatgtttgtaaccacccaggcagggaaccacagtgagcaggccacaccacaggcaatacgccaggcctgcctcagctcctggctggacagacagaagtgcgagcagtttgtggagcagcacatgcctcggctgcagaccctagcatccgggggcagggatgcccacaccacctgccaggccctgggggcgtgtaggaccacgttcagtcctctccagtgtatccacattcctcacttctgacaaggactcaaagccatgccagcccaaaccagagccacttccttgtgaggtgcagccaaggcagcaccctctggaggagatccgcaagaggggacttccggcctgataacttccggccagaactcacacccaactggagccaggccagctcccgtaaccccccagcgctgggtccagggaacacatcagccacatggcccttccctggcttgattccctttcatctccatgtgcataagacactagcttttacagttattttgctaatactttcataaaacttaaattcaggagaataaaaaatgggaccatgaagtaccgtagaagatagatatactgagagcaagctt

SEQ ID NO: 215823 - DNA, 762 bp, Canis familiaris; identical to SEQ ID NO: 5716

SEQ ID NO: 215824 - DNA, 461 bp, Canis familiaris; identical to SEQ ID NO: 5717

SEQ ID NO: 215825 - DNA, 445 bp, Canis familiaris; identical to SEQ ID NO: 5718

SEQ ID NO: 215826 - DNA, 1400 bp, Canis familiaris
ttaactgggattattagctggggtgaagagtgtgcgatgaaagggaagtatggaatatataccaaggtgtcccggtatgtcaactggattaaagaaaagacgaagctcacctaaagaataatgtatttccaaggttgacacgtttagggtagaaaatggacaaggtcctttactaactaatcactttttttatctctttagatttgactatatacattctctgaatactgctttttctctttctggggagaaatctatctagaattctattttactagactaagtgaattagaaaatgtaatcactacgggaatgtactgtgatgggaacttgtgaccactcccacaggtctagcccttggcaccattgtgaggttaggttattcctcctgcccgtcaggtgttaagtttctccactggggcaactccctgattctccctccttggcagcattccatgttccagacctttcttacctttcccatggaaatcatcaaaatgtgttagatctacatccaggatatttgatctagttcataacaagtctaacacctcacttgttaaggaagaacacaggagcaactgacaggttgcaactcaccagaaaacactatttccttttctgtatgcttattcctgcttcctttatctcttctgtttcctaatcctgaaatcagtgtctctctttctctttctctctctctttttcctacagaggtttaaaggagggaagggacacatcatgctgttttactactgtccacagttatacatgtctatcaaacccagacttgctttcagtttggtctttgacttgcttttcggagcatagggatgaagccagtgcctgaagcacgtgcaggaaaatttatctgaaagagtcatgtctcagtactgaaatacatgcatcgtggaaggaatgaccgacccatcagaatagtccaataagcatttgtaattgtgttgtgatagaggtaactaagaagagtgacatcaactcctgcgtctcatcccccatgtgaaaaaactgtgaactaaaagagaacagccagtgtgcaacgtagaactagtagagtcttcaaggaagaattcattggtgggtctccagtactggccggagctaaggaagaagttgccctcgaccaaagaacatgagcaccctgtctcttaaactagcatgtccccacagtggagaaggatgtactggtggcttaaggcatgagtcaggggtgtcttgggtggctcagtggttgagcctttggctcagggcatgatcccagcgtcctgggattgagtcccgcatcaggcttcctgcagggggcctgcttctccctctgcttatgtctctgcttctctgtgtgtgtgtgtgtgtctctcatgaaaaaaataaataaaatcttt

SEQ ID NO: 215827 - DNA, 600 bp, Canis familiaris
aggaccctgtgaacgtctctgcccatgtccagccggtcaccctgccacccgccttgcagaccttccccacggggacgccgtgctgggtgacgggctggggtgacgtgcacagtggaacgcccctgccgccgcccttccccctgaagcaggtcaaggtccccatcgtggagaacagcatgtgtgacgtgcaataccacctgggcctcagcacgggggacggcgtacggatcgtccgcgaggacatgctgtgcgctggcaacagcaagagcgactcctgccagggcgactctggagggccgctggtctgcagggtgaggggcgtctggctgcaggcgggtgtggtcagctggggagaaggctgcgctcagcccaacaggcctggcatctacacccgcgtcgcctactacctggactggatccaccagtacgtccccaaggagccctgagcccagcccccgggccgcccgggttggtggggaagccggcctccacggcgcctcacccctgccccccggcccgggggccgcccttttccccctgtccccgtggcctgtccccggagcccgccgtgggcccaccctcattaaagtgcatggaagc

SEQ ID NO: 215828 - DNA, 600 bp, Canis familiaris
ggcggacatcgccctgctgaagctggaggcccccctgacgctctccgaggacgtcaacctggtgtccctcccgtctccctccctgattgtccccccggggatgctatgctgggtgaccggctggggagacattgcagaccacacgccactgcccccaccctaccacctgcaggaggtggaggtccccatcgtggggaacagggagtgtaattgtcactatcagaccattcttgagcaagacgatgaggtcatcaagcaggacatgctgtgtgccgggagcgagggccacgactcctgccagatggactccgggggccccctcgtgtgcagatggaagtgcacctggatccaagtgggggtcgtgagctggggctatggctgcggttacaacctccctggggtgtatgcccgcgtgacgagctacgtgtcctggatccaccagcacatccctctgtcccccggaccctagaagggacacacgtcagtcttccttgtctcatcactgcgtgttcctgcgcggtggcagggggagcggggagaagtccggggtctcggatgcctgcttggaattggattcttattaaacatgctgggaaaacc

SEQ ID NO: 215829 - DNA, 1368 bp, Canis familiaris
atggtgagcatctggacaatcgcgctgtttctgctgggagcagccaaagcaaaggaagtttgctatgaacaaatcggatgcttttctgacgcggagccctgggccgggacagcaatcaggcctctgaaagttctcccctggagccccgagagaatcggcacccgcttcctgctctacaccaacaagaacccaaacaactttcaaactctccttccctctgatccatcaacgattgaggcatcaaattttcaaacagacaagaagacccggttcatcatccatggcttcatagacaagggagaagagaactggctgctggatatgtgcaagaacatgttcaaggttgaggaggtgaactgcatctgcgtggactggaagaaaggttcccaaacctcatatacacaggctgccaacaacgtgcgggtggtgggcgcccaggtggcccagatgctcagcatgctctcggcaaactacagctactcaccttcccaagtccagctcatcggccacagcctgggagcccacgtggctggggaggcagggagcaggactccaggtctgggcaggattacagggttggatcctgtagaagcaagtttccagggcactcctgaagaggttcgacttgatcccactgatgctgactttgttgatgtgattcacacagatgcagctcccctgatcccattcctgggaactcgggacttcgtggcttgcaatcacctgagaagttacaagtattactcagagagcatcctcaaccctgatggatttgcttcctacccctgtgcttcctacagggcctttgaatctaacaagtgcttcccctgcccagatcaagggtgcccacagatgggtcactatgctgataaatttgctgtcaagacaagtgatgagacacagaaatacttcctgaacaccggagattccagcaattttgctcgctggagatacggggtttctataacattgtctgggaaaagagccactggtcaggctaaagttgctttgtttggaagtaagggaaatactcatcaattcaatatcttcaaggggattctcaaaccaggctctactcattccaatgagtttgatgcaaagcttgatgttggaacaattgagaaagtcaagtttctttggaataacaacgtggtaaacccaacctttcccaaagtgggtgcagccaagatcaccgtgcaaaagggagaggagaaaacagtgcacagcttctgcagcgaaagcaccgtgagggaggatgttctgctcaccctcacgccctgttaacgtccaggcgcaacccgggcaccgtgttaacagcaataaaaaccactgatgcatttacccactcccacgtctgtcgctgctgtc

SEQ ID NO: 215830 - DNA, 163 bp, Canis familiaris; identical to SEQ ID NO: 5723

SEQ ID NO: 215831 - DNA, 160 bp, Canis familiaris; identical to SEQ ID NO: 5724

SEQ ID NO: 215832 - DNA, 160 bp, Canis familiaris; identical to SEQ ID NO: 5725

SEQ ID NO: 215833 - DNA, 166 bp, Canis familiaris; identical to SEQ ID NO: 5726

SEQ ID NO: 215834 - DNA, 160 bp, Canis familiaris; identical to SEQ ID NO: 5727

SEQ ID NO: 215835 - DNA, 655 bp, Canis familiaris
atggagccctgcgcagcgctgccccgggccctcctgctcctcctgttcttgcacctgtcgccactcggaggccgcccccacccgctgggcggccgcagccccgcctcggaagcctcggaagcctcagaagcctcggggttgtgggccgtgcaggagctgctgggccgtctgaaggacgcagtttcagagctgcaggcagagcagttggccctggaacccctgcaccggagccacagccccgcagaagccccggaggccggaggaacgccccgtggggtccttgcaccccatgacagtgtcctccaggccctgagaagactacgcagccccaagatgatgcacaagtcagggtgctttggccggaggctggaccggatcggctccctcagtggcctgggctgcaatgtgctgagaaagtattaaggaggaagtcccgactgcccacatctgcattggattcttcagcagcccctgagccccttggaagcagatcttatttattcgtatttatttatttatttatttcgattgttttatataagatgatcctgacgcccgagcacggattttccacggtgaaataaagtcaaccttagagcttcttttgaaaccgatttgtccctgtgcattaaaagtaacacatcatttaaaaaaa

SEQ ID NO: 215836 - DNA, 1400 bp, Canis familiaris
actggggcaactccctgattctccctccttggcagcattccatgttccagacctttcttacctttcccatggaaagcatcatcaaaatgtgttagatctacatccaggatatttgatctagttcagaacaagtctaacacctcacttgttaaggaagaacacaggagcaactgacaggttgcaactcaccagaaaacactatttccttttctgtatgcttattcctgcttccttatctcttctgtttcctaatcctgaaatcagtgtctctctttctctttctctctctctttttcctacagaggtttaaaggagggaagggacacatcatgctgttttactactgtccacagttatacatgtctatcaaacccagacttgctttcagtttggtctttgacttgcttttcggagcatagggatgaagccaggtgcctgaagaccttcaggaaaatttgtctgaaagagtcatgttactgaaatacatggcatcgtggaaggaatgaccgacccatcagaatacgtccaataagcatttgtaattgtgttgtgatagaggtaactaagaagagtgacatcaactcctgcgtctcatcccccatgtgaaaaaactgtgaactaaaagagaacagccagtgtgcaacgtagaactagtagagtcttaaggaagaattcattggtgggtctccagtactggccggagctaaggaagaagttgccctcgaccaaagaacatgagcaccctgtctcttaaactagcatgtccccacagtggagaaggatgtactggtggcttaaaggcatgagtcaggggtgtctgggtggctcagtggttgagcctttggctcagggcatgatcccagcgtcctgggattgagtcccgcatcaggcttcctgcagggggcctgcttctccctctgcttatgtctctgcttctctgtgtgtgtgtgtgtgtctctcatgaaaaaaataaataaaatctttaaaaaaaaaaaaggtatgagtcattccagtgagccatctcactcccccttttctggtttcaggttctctaggcaaccttttgattataattaggccttccatattgaattttctaaagagttgctgaccaacctctgcatgtactttagtgtgttaggctggctccctttatgaattaataaactgttgttctggttgatactgtagctttttgtgaatgtggctgatgtgaatcagtcatcccacatgttgttatatatgagactactgacaaaatcatgtttgggaccactttgacctgaccaagctgctgccttcacctcacccccagccaggcatttactttagtccttcaaatattaagtaccaataaatgtcttttcaaatttcaaaaaaaaaaaaaaaaaaaaaaaaaa

SEQ ID NO: 215837 - DNA, 600 bp, Canis familiaris
tcacaggagcagaaactgcacctggaacagtgtctggaacagcatcaggaacaacaagagtcacaggaccagaaactgtacccggagcagtgtctggaacagcagcaggagcaacaagagtcacaggaccagaaactgtacccggagcagtgtctggaacagcagcaggagcaacaagagtcacaggagaaggaacttcatctggaacaggaacagcagaaggaggagctacagcagcaggaacagcagcagggaaaggaacagtgtgagaaacatcaggaagcaaaaaatctggagcagcagctagagcagataggagcacaaaggaagcagcagcaaaaggaacagctggaacaggaaaagaagctcgtggaccagcacctggatcaagagccagcacagagaactgagcaaccggaaaagaaagaagagcaggtgctggagcagcaggggcagcaggaggggcagctggagcagcctgcctttgtcccagctcaggtccaggtccgagaacccctgaagggagaagtcctgcccctcatagagcagcagcaccagaagcaggaggttcatgaccctccagaacaccagtgagcaccc

SEQ ID NO: 215838 - DNA, 1400 bp, Canis familiaris
ttgctatgaacaaatcggatgcttttctgacgcggagccctgggccgggacagcaatcaggcctctgaaagttctcccctggagccccgagagaatcggcacccgcttcctgctctacaccaacaagaacccaaacaactttcaaactctccttccctctgatccatcaacgattgaggcatcaaattttcaaacagacaagaagacccggttcaccatccatggcttcataaacaagggagaagagaactggctgctggatatgtgcaagaacatgttcaaggttgaggaggtgaactgcatctgcgtggactggaagaaaggttcccaaacctcatatacacaggctgccaacaacgtgcgggtggtgggcgcccaggtggcccagatgctcagcatgctctcggcaaactacagctactcaccttcccaagtccagctcatcggccacagcctaggagcccacgtggctggggaggcagggagcaggactccaggtctgggcaggattacagggttggatcctgtagaagcaagtttccagggcactcctgaagaggttcgacttgatcccactgatgctgactttgttgatgtgattcacacagatgcagctcccctgatcccattcctgggttttggaacaagccaacagatgggtcaccttgacttcttccccaatggtggagaggaaatgccaggatgcaagaagaatgccctgtcacagatcgtgaacctagatggcatttgggaaggaactcgggacttcgtggcttgcaatcacctgagaagttacaagtattactcagagagcatcctcaaccctgatggatttgcttcctacccctgtgcttcctacagggcctttgaatctaacaagtgcttcccctgcccagatcaagggtgcccacagatgggtcactatgctgataaatttgctgtcaagacaagtgatgagacacagaaatacttcctgaacaccggagattccagcaattttgctcgctggagatacggggtttctataacattgtctgggaaaagagccactggtcaggctaaagttgctttgtttggaagtaagggaaatactcatcaattcaatatcttcaaggggattctcaaaccaggctctactcattccaatgagtttgatgcaaagcttgatgttggaacaattgagaaagtcaagtttctttggaataacaacgtggtaaacccaacctttcccaaagtgggtgcagccaagatcaccgtgcaaaagggagaggagaaaacagtgcacagcttctgcagcgaaagcaccgtgagggaggatgttctgctcaccctcacgccctgttagcgtccagcgcaacccgggcaccgtgttaacagcaataaaaaccactgatgcattt

SEQ ID NO: 215839 - DNA, 600 bp, Canis familiaris
tgggagagtctgctgttggcaaatcaagcctagtgcttcgttttgtgaagggccaatttcatgaatttcaagagagtaccataggggctgcttttctaacccaaactgtgtgtcttgatgatacaacagtaaagtttgaaatatgggatacagctggtcaagaacgataccatagcttagcaccaatgtactacagaggagcacaagcagccatagttgtatatgatatcacaaatgaggagtcctttgccagagccaaaaactgggttaaagaacttcagaggcaagccagtcctaacattgtaatagctttatcaggaaacaaggctgatcttgcaaataaaagagctgtcgatttccaggaagcacagtcctatgcagatgacaacagtttattattcatggagacatcagctaaaacatcgatgaacgtaaatgaaatattcatggcaatagctaaaaagttgccaaagaacgaaccacagaatccaggagcaaattctgccagaggaagaggagtagaccttactgaacccacgcagccaaccaggagtcagtgttgtagtaactaaacctccagtttgaacttcctggaatatc

SEQ ID NO: 215840 - DNA, 600 bp, Canis familiaris
tggtaaatcatgcttattgctacagtttacagacaagaggtttcagccagtgcatgacctgactatcggtgtagagtttggtgctcgaatgataactattgatgggaaacagataaaacttcagatatgggatacggcagggcaagagtcctttcgttccatcacaaggtcatattacagaggtgcagcaggggctttactagtgtatgatattacaaggagagatacattcaaccacttgacaacctggttagaagatgcccgccagcattccaattccaacatggtcattatgcttattggaaataaaagtgatttagaatcaagaagagaagtaaaaaaagaagaaggtgaagcttttgcacgagaacatggacttatcttcatggaaacttctgctaagactgcttccaatgtagaagaggcatttattaatacagcaaaagaaatttatgagaaaatccaagaaggagtctttgacattaataatgaggcaaacggcattaaaattggccctcagcacgctgctactaatgccacacacgcgggcaatcagggaggacagcaggccgggggaggctgctgttgagtccgtttttt

SEQ ID NO: 215841 - DNA, 600 bp, Canis familiaris
gcaggccaggaacggttccagtcccttggtgtggccttctacagaggtgcagactgctgcgttctggtatttgacgttactgcccccaacacattcaaaaccctcgatagctggagagatgagtttctcatccaggccagtccccgggatcctgaaaacttccctttcgttgtgttgggaaacaagattgacctcgaaaacagacaagtggccacaaagcgggcacaggcctggtgctacagcaaaaacaacattccctacttcgagaccagtgccaaggaggccatcaatgtggagcaggcgttccagacgattgcaaggaatgcacttaaacaggaaacagaggtggagctgtacaatgaattccctgaacccatcaaactggacaagaacgaccgggccaagacctcagcggaaagctgcagttgctgaaggggcagtgagagcagagcacagagtccttcacaaacaaagaacacacttaggccttccaacacgagcccccttcttctcttccaaacaaaacataaagtcatctctcgaatccagctgccaaaagaccctaccaaacacttcaccctgacacacacatacacacac

SEQ ID NO: 215842 - DNA, 784 bp, Canis familiaris; identical to SEQ ID NO: 5735
  misc_feature (418)..(442): n is a, c, g, or t

SEQ ID NO: 215843 - DNA, 281 bp, Canis familiaris; identical to SEQ ID NO: 5736

SEQ ID NO: 215844 - DNA, 1400 bp, Canis familiaris
gacccctatctcactaatttccttaaagacagtataatacagcagctcacacagactttcggattcagaaaaacagttgtgtcgggccttgggtaaattatgtaaggcaagcctcagtttgctcagcggtaaaacgaggaaagtaataagccacccgcctccgccattttgggtagaataagggtgcatccagtgagagaaggatgcagtcgaggaacctctggagaattctgggactctgtctcttatcagttggtgcttgggggcaggacgaggatttcaaagcttctgatgacttgacaagtatatctccagagaaacggtttaaggtctccatctctggaaccgaggtagtggtgacatgccctgatgtttttggatatgataatataaaatgggaaaaaaatgataaccttgtggaaggtgctagtaacagagagctatctcagaaggagttttcagaagtggacgacagtggttattatgcctgctatgcagattccataaaggagaagagctatctctacctgagagcaagagtgtgtgcaaactgcatagaggtgaatctgatggcagtggtcacaatcattgtagctgacatctgccttactctggggttgctgctgatggtgtattactggagcaagactagaaaggccaatgccaagcctgtgatgagaggaacaggtgccggcagcaggcccaggggacaaaacaaggagaagccaccacctgttcccaatccagactacgagcccatccggaaaggccagcaggacctgtattctggcctgaatcagagaggcatctgacggctcctgaggacacggcctccccagggcccaggtcttggtgtctccaggtcctgctactcccagtaccctgggtaaatcttgaaccccagaagagaattattcctctgccttctggagaactaactcccagcctgcagccttatccccagcaccctccaacccgccttctctgctggcacttggtcctgcaatatcacctcctcatcatggccactcaccgcccccccaccagccagactgccctctggtcggggtatttatttctgttaccctgacgcccccaccatcaccaattccttcctacccttcagaggtatccttgctcccttccgtacccctctcccggacagaacctgcccccatcccttactatcccacctacctttccgtttttccagctctctctttggtgaccctctgtggggatggactaggtaactctggtagaggtcctgccccatccatgaccttggcccagagccaccctctgccagcaggcccctggatgatcatttgcattcttacaaatgtgctaggctccttgacagctagagagaaaataataaagtgtatttggttgaaaaa

SEQ ID NO: 215845 - DNA, 530 bp, Canis familiaris
cagtcgcgtcggcaccgcggagcgggctgcgtcaggtggctggcccggcggcgctcgctggctccccggctcccggctctccggctcggggctgcggcgccggctggagcgaacccctgtcccggcgcggggcggcggcgggcggccggcaggcaggcaggcaggcactgcttgcgtgtgagtgcacctcactcacatgtaagtccgggtgcaccgtggcctcccgaggaagtgcgagtcgccggcgcggggcaagagccgccggggccgggacagggcaggggcgccccggcgctgccgccctgccccgagcccgccgcaggacccccccaattctctcttttctcttttctcctcctctccattggcgtgcccaagagccaaaccgaggagcgcctgagggtaacagcaaactcgtgccatcgcgcctctgcactttcttttttgagattgtttgacatttctcggtgctttttggtttctcgctgttgttgggtgctttttggtttgttctacacccctttttttcc

SEQ ID NO: 215846 - DNA, 600 bp, Canis familiaris
agtatgcagacgcgtccataggtaacgtcactggcagcaacgcggtgaacgtctttctgggaatcggcgtggcctggtccatcgctgccatctaccatgcagccaatggggaacagttcaaagtgtcccctggcacgctagctttctctgtcactctcttcaccatttttgctttcatcaatgtgggggtgctgctgtatcggcggaggccagagatcggaggtgagctgggtgggccccggactgccaagctcctcacatcctgcctcttcgtgctcctatggctcttgtacattttcttctcctccctggaggcctactgccacataaaaggcttctaaaggaacaatcagatatagtaaatttatatatatatacgtatatatatacataaaatattatgtataatgaacagaggaaactgacatttgtcatgttcacttacctgctgatggaatccagcttcaagagcatactctgtactagggctgaagtgagaaaccatcacctcccattcccaggggcgtcatcacattgaacaaggcatggaggcaggggcatctttgcagctcagcctagaaggactgtgttctggaattc

SEQ ID NO: 215847 - DNA, 327 bp, Canis familiaris; identical to SEQ ID NO: 5740

SEQ ID NO: 215848 - DNA, 423 bp, Canis familiaris; identical to SEQ ID NO: 5741

SEQ ID NO: 215849 - DNA, 452 bp, Canis familiaris
atggaaaagatcctcgtccttctgctcgttgcccttgcggtggtctacgcggttcctgaccctcgggggatcattatccacctggaagacggcgagctctgtctgaacagcgtccagtgcaagagcaagtgctgccaccgggccaccgggctgagcctggcccgctgcgcacccaaggccagcgagaacagcgagtgctctgccaagacgctctatggggtttactacaagtgtccctgtgagcggggcctgacctgtgagggtgacaagtccatcgtgggctccatcaccaataccaactttggtgtctgccacgatgctgggcgctccaagaagtaaagccactgaaggatgctcctcatccaccacctctccctggctggccacccccttaaccagcacctcccttttctgattggattctcagcaattaaagctcttcctgcaacctt

SEQ ID NO: 215850 - DNA, 600 bp, Canis familiaris
ccaagtcagaaaaagcttcatacatccactctacaaaacgaaggtccctagagccgtcatccgtccaggggaagatagaagccatgacctcatgctgctgcacctggaagagcccgccaagataacaaaagctgtgagggtgatggacctgcccaaaaaggaacctccattggggagtacctgctatgtctctggatggggcagcactgatccagaaacgatttttcacccagggagtctccagtgtgtggacctcaaactcctgtccaataatcaatgtgcaaaagtatacactcaaaaggtgacaaagttcatgctgtgtgctggtgtcttggagggtaaaaaagatacctgcaagggtgactcaggaggccctctgatatgtgatggtgaattggtaggtatcacatcatggggggctactccatgtggcaagcctcaaatgccatccttgtataccagggtgatgcctcatctgatgtggatcaaggacaccatgaaagccaacacctgaatgtccctttcctactctctactcctagtaaaattgagtatacatcaagttgtggaatcatctggtctttctggatacagggtacc

SEQ ID NO: 215851 - DNA, 660 bp, Canis familiaris; identical to SEQ ID NO: 5744

SEQ ID NO: 215852 - DNA, 600 bp, Canis familiaris
agttctctgaacatcagtgtggatggggaaggagagttcactgtcaggatggccttgttccaagaccagagctacatatctccttatgaaggggctgcagctgtgctggctgtcgaatccatgctctatgtgggtgccatcttggagaaaggggacacctcccggtttaacctattgttgaggaactgctatgccacacctactaaagacaagactgaccctgtgaaatatttcatcatcagaaacagctgcccaaatcaatatgattccaccatccatgtggaggagaatggggtgtcctcagaaagccggttctcagttcagatgttcatgtttgctggaaattatgacctagtgttcctgcattgtgagattcatctctgcgattcccttaatgaacagtgccagccgtgttgctcgagaagtcaacagcgtagtgaaatagtggctctcaacccagctcgggttctagatttgggacccatcactcggagaagttctgcatctgttgacatcacagatggaacccccagcactgcagggttcctgttggcctggcccatgcttctcctgcctatcctcctggctgagctgttttga

SEQ ID NO: 215853 - DNA, 489 bp, Canis familiaris; identical to SEQ ID NO: 5746

SEQ ID NO: 215854 - DNA, 202 bp, Canis familiaris; identical to SEQ ID NO: 5747

SEQ ID NO: 215855 - DNA, 600 bp, Canis familiaris
aaggaaagccgtgttttattattaaaatgaacaggatcgtgaacttcctccccagcaacagcacagcgcccagggccgactgcaccttcttggaccagcacaaggatgaccggcccctgcaggtggaatattacccacccaacggtaccttcagccttcgctatttcccttactacgggaaaaaggcgcagccccactacagcaaccctctggtcgccgcgaagcttctcaatgtccccagaaacacggaagtcctcattgtgtgcaagatcctggcagattatgtgacctttgacaacccccatgacccctatgaagggaaagtggagttcaagctcaccattcagcagtagagagcaaggaggctgcaccctggcccccatgacccctatgaagggaaagtggagttcaagctcaccattcagcagtagagagcaaggaggctgcaccctggctgcccacccccctgccatccctgtactcctcctagctgcccgtcgacatgctgcaaaactgctcaggcctgacagaccccaacttcggctttgcagaaggaaagccgtgttttattattaaaatgaacaggatcgtgaacttcct

SEQ ID NO: 215856 - DNA, 600 bp, Canis familiaris
tgacgggagtacatatcacacattgactcggagatcccgatggaacacaacatgttggaagtgacaactgaacgcaccatattggattctgacattcccttagaggggttccttcatgaggcttagtgttctggagtccgtggggaaggaactagagaaacaaaaagccttcatgagccatcattgtcttgagttttcctggaggcttcttgaggtgtccctagtcccacacgcctcttgcaatgttgtcctccactcacggagcactggatggaagggactcagaggtgatccctaggctgttctttgaacagctttgaacagcttagggtgcctgtactatgcccaggcagacatcactaatcgatgacagagtctctccgacctcacaggccttccaaatatagtgctctaggcagctccattggccaccccactttggtccaacctctggactttgtgggtgaggagactgaggactaaagagagagtgactttttcaagttcacatagctatgcctaaaacctggcctccttgttctcaggccatggttctttccattatgccctcctgccttggttaacaagcaagtacagatt

SEQ ID NO: 215857 - DNA, 600 bp, Canis familiaris
tcagccagaagatgttaatctgttggtgacctgcagagaagagggcaatccagtggcttcgttagggcattcagaggcagaaacaccagtagatgcttattccaatgggcaagcagctcttatgggtgagaaagagagaaagaaggaaacagaggatggaggccggtactggaagttcatagattggttctgtggctttaaaagtaagagcctcagcaagaggagtctcagagacctgatggaggaggaggctgtttgtttacaaatgttggaagagcctccacaagttaaactaatactaaatatcggactttttgctgtgtgttcacttggaattttcatgtttgtttatttctccttatgaactttttaaggatatgatgagacactaacttaagaaaatactggtctttggaaaacaaaacaaaacttatgtaactgttgcatctctcaggcattgtttacgctataggttttagccaaattttacttagcagaaaaatcatctatttgcaagactttattttcccagagatggacgaaagtaaattttcaacctaaatgaagtaaaacttgtttaacagaaaaaaaaaaaaaaaa

SEQ ID NO: 215858 - DNA, 600 bp, Canis familiaris
ccccccaatgggagttgccggccggagggcgggctggctggcgaggacggcgacggctgctacgtgcagcttccgcgctcgcgtcagaccctggagctgtccgcgctgaccgcgcccactcctgggcccggaggtggcccccggccctaccaggccaagctgttggccaagaagcgcgtggtgcggatgctgctggtgatcgtcgtgctttttttcctgtgttggttgccactgtatagtgccaacacgtggcgtgccttcgacagctctggtgcacaccgcgcactttcaggagcgccaatctctttcatccacttgctgagctacgcctcagcctgcgtcaaccccctggtctactgcttcatgcaccgtcgcttccgccaggcctgccttgagacgtgtgcccgctgctgccccaggcctccacgagctcgcccccggccccttccagacgaggaccctcccaccccttccattgcttcactgtccagactgagctacaccaccatcagcacgctagggcctggctgaggggtagggggagagtggaggctgagacgggacacacccattcctacaggcagggacccacccagacac

SEQ ID NO: 215859 - DNA, 600 bp, Canis familiaris
gctggattcatactcatgggagacagtgctctcagatgcagaccttcaggaaaatggacagcaggaacgccaacatgccaagctatcaaatgccctgagctgcatattattgagccaggcgtgatgaactgctccaatccttggggaaatttcagctatggatcaacctgtagcttccattgtccggagggccagttacttaatggatcagcgagaacagcatgccaagagaatggccaatggtcaactcccatgccagcctgcaaagcagggccattggcaatccaagaatccctgacttactttggtggagcagtggcttctgcaataggtttgatgacatgtgggacactcttggctctgctaagaaagcgcttcagacaaaaagatgatggggaaagccctttgaaccctcacagccatctaggaacatatggagtttttacgaatgctgcatttgacccaaccccttaagagacctgtcctgctggtctcctcactcaacctccacaggatcctatttttgaacaccagttttcctgccagacttgagttacactgtagcatattagctgcagttttctggtaatacttgtaagg

SEQ ID NO: 215860 - DNA, 1400 bp, Canis familiaris
tcgacttcctctggaaactgcaggccacggaggagaaggaggagatggaggagctgcaggcctacaaccggcggctgctgcacaacatcctgcccaaggacgtggctgcccacttcctggcccgtgagcgacgcaacgacgagctctactaccagtcgtgcgagtgcgtggctgtcatgttcgcctccatcgccaacttctccgagttctacgtggagcttgaggccaacaatgagggtgtcgagtgcctgcgcgtgctcaatgagatcatcgctgactttgatgagatcatcagcgaggatcggttcaggcagctggagaagatcaagaccattggcagcacctacatggccgcctcaggcctcaatgactctacatacgacaaggtgggcaagacccacatcaaagccctggctgactttgccatgaagctcatggaccaaatgaagtacatcaatgagcactccttcaacaacttccagatgaagatcgggctcaacatcggccccgtggtggccggggtgatcggggctcgcaagcctcagtacgacatctggggcaatacggtgaatgtggccagccgcatggacagcaccggcgtgccggaccgcatccaggtcaccacggacatgtaccaggtgttggctgccaacacgtaccagctggagtgcaggggtgtggtcaaggtcaagggcaaaggcgagatgatgacctacttcctcaacggtgggcccccgctcagttagcagctgccaactggtgatgccaggccgcctggcctcctgagaaacggaaatggcttctttgtgtgccggtgggcaggtggaagcctgcgctctagcccgtgtggccgcgccggtgagattttccactttgactccagaagcagcttctgcctttgtgggcagcccaggccctggggcgccagcgtcctgcgagcaccaagctgaccaaagatgtttcctccgtggaagactccgccaggcgtgatctgagtctcgagttttctaacgggtgctgctactgcacgggtagaaaggagctgctggagctctggcggcgtgtggtagccaggcgtgcggcgacagggctgacggggaggcctcggctgggggacccagggccccgctttcctgtgtgagcatttcagcttccgccagagcgcacggcccctgccccacggaggcgttctggcgggagtgctggctgtggaggggctgcggcttctcgcagtcctcctcctgcacccgcacacgtagacgacgcctcgtcgaggggaacggaacgaagtgcgagggggaggcgagaggactcgaggcaaggaggggtggttctgagaaaaagaatatttattaaataaaacaactttctgtgcccttaaaaaaaaaaaaaaaaaaaaa

SEQ ID NO: 215861 - DNA, 1400 bp, Canis familiaris
actttctggatgccaatggagcactgaagaagaatgaagcatttatccccttctccatagggaagcgcatttgtcttggtgaaggcatcgcccgcatggaattattcctcttcttcaccaccatcctccagaacttctctgtggccagccccatggcccctgaggacattgacctcacaccccaggagataggtgtgggcaaattgcccccagtgtaccagatcagctttctgtctcgtggagggtgctgagggaaggggggtcaaaggattccaggatcatgaaatatgtccactacttcagagaacagctgcttgcctctctctgggtcttcctgccactgaaagacccacttccagccagtgtccttcccctccttgattgctgcctccctgggaaattcctctctgccatctcatctcaccccatcattctgcagctcttgtaaagactcatgggggtgtgtttctttcctttgtcaataaagttacatatgtggtgtagagctagaagctggggattaaggggagatttgactcaggtgctctctgcatttctgcctcccaaaccacagcttcccccagtgactcctcccatcctcagaacaaccaccacctccactgagcaaccatttgtgctccatgatctgtgcctatgtgagctcacttgaatcttccttcagtagtcccatgggatggctacagtgattgtgttttacagacgagtaaacaaaggccaggcactggcatcagttttcccagatcatatggctgggagtggaggagcaagattcacactctgtctccctggttctcaaactcaaattcttcacctaaccacaacccccattatatttttaaattatagtaaaattcacatcacataaaacaagtgttttaaagtgtataatttagtggcattgagttcattcgcaatgttgtacaaccaccaccactatcgagttccaaacattttcatcactcaagaagaaaaccccttacccagtaacagtcactctccatttcccttccccctcagcccctggcaaacaccaatctgcttccagtctctgtggctttgcctattctatgtatcttatgtaaatggaatcatacaatatgtgctctgttgtgtctggcttctttcactcaggataatatttttgagattcatccacattgtagaccattgctgtaccctactgtcctcattcttactgactctccttactgcttccctctgtgcaaagggctccttggctccttggcccatgggctccaggcccatgattctaatctagtgcctaaactggtttctttacagtgcccttcaattctctgaaactcaaataaacatcaaaagcctgacatcccctggtcaggtggtgagccaaaaaaaaa

SEQ ID NO: 215862 - DNA, 600 bp, Canis familiaris
acacggtgaatgtctctagccgtatggacagcacgggggttcctgaccgaatccaggtgaccacggacttgtaccaggttctagctgccaaacggtaccagctggagtgtcgaggggtggtcaaggtgaagggcaagggggagatgaccacctacttcctcaatgggggcccccccagttagcagacgccagctacaagttcagctgtcaggaccaaggtgggcatttaagtggactctgtgctcgctggatggagctgtggccgggggcaccaagcctccagaccctgctgaccacaaaagggaacacctcagcaggctgtgcttggaccatgctcgtctgccctcaggctggtgaacaagggataccaagaggattatgcaagtgacttttacttttctaattggggtagggctggctgttccctctttcttcctgcttttgggagcaggggaggcagctgcagcagaggcagcaggagccctcctgcctgagggtttaaaatggcagcttgccatgcctaccctttcccctgtctgtctgggcaacagcatcggggctgggcccttcctttccctctttttcctgggaatattttgt

SEQ ID NO: 215863 - DNA, 1400 bp, Canis familiaris
cgagcctttatgaacaaggaagcgctctgtgccccagcattcagggacgaggagaagcacccctcaccccctccccatcctcaaaggtgtggctctgtaggacaggcgactgcctctgcccagccagagaggcagcaccccttcaccctggccctgcacccagtagccctctgagctaggaactgagatccctgttgcatatgaggaaactgaggcccagtgaagccagctgtggaaagaagcagaagtccttgggcaggatttagcctgaggctgtgcgggacattcccaggcagctagaagcagccttgggtgatttctgggtggcacacagccccctctctgtatctctcgttctcaccccagatccccagtgcacccctaaaggaggtggtgaagcacgaggggagcgagctgctctctgcctagcacacggtgatcttgcatcccccacaggccgccacggcacggcggtccatggtccagccggcttctccccaacactgcccttctggaaggggaaaagctctgggcagccagtgctcaaggcagaggtgccagccttcccctcgagcctagacacaggccaggacggatgcaagagaaagctcgaggcggctagaggtcccgtccagccccgagacccggtgccaggcagccccacgtaaatcgcaccgtgcaaaaatccaacaagcaccaaccaaacaaaatcccgagagcaaaactcagagaggggcgtgagtaacccggaagccagagaacagcatttccctcgccccccgccctgttaacgcctggccctcagaatgctcttgtttttaataggaagctgtttcattgttctcttgtgggtgtcactacagacgtgttctgacagttccctgagggatggagcatcttgttatatatttggcttcaaattgagatgttggctccgtttctccccccctccccccaattaattttcgaatccctagcaactgtgactgtatttagcacaagagaaagctgagatcgtgggtcttgcctccttccagaaatatgtctggctcatcaggactttttttaagacttcaaaatatttttaagatattttaaacttttgtaaaaaaaaaaaacaacaaccaacgagactcttctgaggaggaacatttgtatctgaataagatcctcggtgtataattcagtcttgcagtatacaagcttttgtgtataaatgttttatgatataatccctgtatttcgcagggctcttcttttcctcttttgctttttagataaatatgtatatcgatattttaaattcatctttgcttttttttagaggagtttgtaatcaccttataacatgaaaataaacatttcctttttaaaatccaaaaaacccacgcgtccgcgac

SEQ ID NO: 215864 - DNA, 600 bp, Canis familiaris
tcaggtcctggagacagcggcctctacttctgtggctacctacagggcgcgcgctacgagcagtatttcggcgccggcaccaggctcacggtcctcgaggatctgcagaaggtcacccctcccacggtcacagtgtttgaaccatcggaagcagagatctcgcggacccagaaggccacactcgtgtgcctggccacgggcttctaccccgaccacgtggagctgagctggtgggtgaacgggaaggaggtcacgagtgggttcagcaccgacccgcagccctacaaggagaggcccagcgagaatgactccagctactgtctgagcagccggctgagggtctctgcctccttctggcacaacccgcgcaaccacttccgctgccaagtccagttctatgggctcggggacgacgatgagtggaaatacgatagagtcaaacccatcacccagaacatcagtgctgaggcctggggcagagcagactgtggcttcacctcggtgtcctaccatcagggcgtcctgtctgccaccatcctctatgagatcctgctgggcaaggccacgctgtatgctgtgctggtcagcatcctggtgctg

SEQ ID NO: 215865 - DNA, 523 bp, Canis familiaris; identical to SEQ ID NO: 5758

SEQ ID NO: 215866 - DNA, 600 bp, Canis familiaris
cttcctcatcctgcgctgcacccagaagcgggtccggcggggtggggggggcccaaggccggggggggcggatagcccggggtggtggggggcctcggcagggccttagtcttcccgggaaggaatgtttcttggcatccgcttccttctcgtctccgtgtctccttgagtcaagtggtggatccctcgtgccgctgcggctcctgcatcccgggaagcacatcgagtgcttgcacccggagggcttgcaaaggctgacggcagacggggatcctttcattttcccaccgttgcagaaatgcaacaggcctgaaatcagttagcagcggcacagcggcaggccagggcgtgggaatggaacagccaggagatctgtccccggccactgtctgtgcatttgtttcacgtccgccccgctcctggtctgttgcctgaaccaggcggacatcgggcctgtctctgtctctccgtctctcacctgtctctgccagtccctacagacgttcgggtctccggaggacctccgtcctttccctttctcctccctccctttgtcccagcccacactcagcccaaatataaaactgaattattagcagg

SEQ ID NO: 215867 - DNA, 600 bp, Canis familiaris
cagttgtcagtcagcttgactgatcttctggacaagttttcaaatatttctgaaggcctgagtaattattctatcatagacaaacttgtgaaaatagtggatgatcttgtggagtgcacagaaggatactcatttgagaatgtaaaaaaagcacctaagagcccagaactcaggctttttactcctgaagaattctttagaatttttaatagatccatcgatgcctttaaggacttggagacggtggcatctaaaagtagtgaatgtgtggtttcttcaaccttaagtcctgataaagattccagagtcagtgtcacaaaaccatttatgttaccccctgttgcagccagctcccttaggaatgacagcagtagcagtaataggaaggcctcaaattccattggagactccaacttacaatgggcagccatggcattgccagcattcttttctcttgtaattgggtttgcttttggagccttatactggaagaagaaacaaccaaatctcacaaggacagttgaaaatatacagattaatgaagaggataatgaaataagtatgttgcaagagaaagagagggagtttcaagaggtgtaa

SEQ ID NO: 215868 - DNA, 600 bp, Canis familiaris
tcggtaccggcctcgggcagcggtcattgctgtcacccgctctgcccaggctgcccggcaggcccacctgtgccgaggggtcttccccttgctctacagtgaacctccagaggccatctgggcagacgatgtggatcgccgggtccaatttggcattgaaagtggaaagctccgtggcttcctccgtgtgggggacctggtgattgtggtgacaggctggcgacctggctctggctataccaacatcatgcgagtgctcagcatatcctgagatgccacgccccactgacccagcccaacctggatcccatgccccagaccccaaggtccccttgcagtcctccctgctgaggccacatccattctagggtgccccttcccctctccatttcacgcaggaccccaaagtctgttgtccagttaagcactgaccatctggcaagtaccaatcctacattccctgcactcaatgctctcagtgggccctaagatgctctgagcccttaatcctagcttaactggttaattctatgcccctagggttcaatatacccaggatgggtggggacaaggacaggcattcacaagcatatgagatag

SEQ ID NO: 215869 - DNA, 364 bp, Canis familiaris; identical to SEQ ID NO: 5762

SEQ ID NO: 215870 - DNA, 516 bp, Canis familiaris; identical to SEQ ID NO: 5763

SEQ ID NO: 215871 - DNA, 180 bp, Canis familiaris; identical to SEQ ID NO: 5764

SEQ ID NO: 215872 - DNA, 286 bp, Canis familiaris; identical to SEQ ID NO: 5765

SEQ ID NO: 215873 - DNA, 275 bp, Canis familiaris; identical to SEQ ID NO: 5766

SEQ ID NO: 215874 - DNA, 279 bp, Canis familiaris; identical to SEQ ID NO: 5767

SEQ ID NO: 215875 - DNA, 161 bp, Canis familiaris; identical to SEQ ID NO: 5768

SEQ ID NO: 215876 - DNA, 600 bp, Canis familiaris
gatagcctgttaccagctgattctggggatagcatgccacctgattctgagattggtggattacaacacgattctgagagtggtggattacaacacgattctgagagtggtggattacaacacgattctgagagtggtggattacaacacgattctgagagtggtggattacaacacgattctgagagtggtggattacaacacgattctggggataatacatcacctccggtttctgtgaataatgactctttcactccccggcctcccacggtttccagctttttagagttctacggtccttcctggtgtctgaccccagcagacagagggctgtgtcacgccaacgagagccgattctactataattcagtcattgggaaatgccgcccttttaagtacagtggatgtggagggaatgaaaataatttcacttctaaaaaagcatgccttacagcttgcaaaaaaggtttcatgcaaagaatatcaaaaggaggattaattaagaccaaaagaaaaagaaagaagcagaccgtgaaaatagtatatgaaaaaatttttgttaaaaaactataaatttgttacactattacatcagct

SEQ ID NO: 215877 - DNA, 552 bp, Canis familiaris; identical to SEQ ID NO: 5770

SEQ ID NO: 215878 - DNA, 1222 bp, Canis familiaris; identical to SEQ ID NO: 5771

SEQ ID NO: 215879 - DNA, 484 bp, Canis familiaris; identical to SEQ ID NO: 5772

SEQ ID NO: 215880 - DNA, 174 bp, Canis familiaris; identical to SEQ ID NO: 5773

SEQ ID NO: 215881 - DNA, 600 bp, Canis familiaris
tcaaaaggaagcttattagatttccttaaggaaggagatggaaagtatttgaagcttccacagctggttgatatggctgctcagattgctgatggtatggcatatattgaaagaatgaactatattcaccgagatcttcgggctgctaatattcttgtaggagaaaatcttgtgtgcaaaatagcagactttggtttagcaaggttaattgaagacaatgaatacacagcaagacaaggtgcaaaatttccaatcaaatggacagctcctgaagctgcactgtatggtcggtttacaataaagtctgatgtctggtcatttggaattctgcaaacagaactaacaacaaagggccgagtgccatatccaggtatggtgaaccgtgaagtcctagaacaagtggagcgaggatacaggatgccttgccctcagggctgtccagaatccctccatgaattgatgaatctgtgttggaagaaggaccctgatgaaagaccaacatttgaatatattcagtccttcttggaagactacttcactgctgcagagccacagtaccagccaggggaaaacctataattcaagtggcctgcaactggg

SEQ ID NO: 215882 - DNA, 484 bp, Canis familiaris; identical to SEQ ID NO: 5775

SEQ ID NO: 215883 - DNA, 295 bp, Canis familiaris; identical to SEQ ID NO: 5776

SEQ ID NO: 215884 - DNA, 109 bp, Canis familiaris; identical to SEQ ID NO: 5777

SEQ ID NO: 215885 - DNA, 120 bp, Canis familiaris
tgactttgccaagtggcgctgtgtgctgaaaattggggaacacactccctcagcccttgcgatcatggaaaatgccaacgttctggcccgttatgccagcatctgccagcagaatggcat

SEQ ID NO: 215886 - DNA, 129 bp, Canis familiaris
aaggatggcgccgactttgccaagtggcgttgtgtgctgaaaatcagtgagcgcacaccctcagcacttgctattctggagaatgccaacgtgctggcccgctatgccagcatctgccagcagaatggc

SEQ ID NO: 215887 - DNA, 52 bp, Canis familiaris
cgtggagatgaagaattggattccctcatcaaggctacaattgctggtggtg

SEQ ID NO: 215888 - DNA, 600 bp, Canis familiaris
ggaccaccgaaatagcttctctctgcctagcgtggatgggcagaagttctacacgttccgtgtccgaagccgctataacccactctgtggaagcgctcagcgttggagtgaatggagccaccctatccactgggggagcaatacctccaaggagaatcctttgtttgcatcggaagctgtgcttatcccccttggctccatgggattgattattagccttatctgtgtgtactactggctggaacggtcgatcccccgaattcctaccctcaagaacctggaggatctggttactgaatatcacgggaatttttcggcctggagtggagtgtctaagggactggcggagagtctgcagccagactacagtgaatggctctgccacgtcagtgagattcccccaaaaggaggggctccaggggagggtcctgggggctccccctgcagccagcatagcccctactgggctcccccatgttataccctgaaacctgaaactggagccctgataccctgacagaacctcagagtcctgtcctcctatattgtactaacttccccttatctaaccaacctgggtccaatgctcacctcgccctc

SEQ ID NO: 215889 - DNA, 600 bp, Canis familiaris
gaactgtccagatttatgaaggcttttctctcttatatgtccaaggaaataaaagagctcacggtcaagacttggggacggctggcagttgccttcgtcgcttcagtaccatgcctttcatgttctgcaacatcaacaatgtttgcaactttgcttcaagaaatgattattcttactggctgtctaccccagagcccatgccaatgagcatggagcccctgaagggccagagcatccagccattcattagtcgatgtgcagtatgcgaacgtccagctgtggtgattgcagttcacagtcagaccatccagattccccattgtcctcacggatgggattctctctggattggctattccttcatgatgcacacgagcgcaggagcagagggctcaggtcaagccctggcctcccctggttcctgcttggaagagtttcgttcagctcctttcattgaatgtcatgggcggggtacctgcaactactatgccaactcctacagcttttggctagcaactgtagatgtgtcagatatgttcagcaaacctcagtcagaaacactgaaagcaggagacttgaggacacgtattagccgatgtc

SEQ ID NO: 215890 - DNA, 600 bp, Canis familiaris
tctcccgccactccaaggggctgcagatcctgggcaagaccttgcaggcctccatgagggagctgggcctgctcatcttcttcctcttcatcggggtcatcctcttctccagtgccgtctacttcgcagaggctgacaaccaggagacccacttttccagcatcccggacgccttctggtgggcagtcgtcacaatgaccacggtaggctatggggacatgaggcctgtcactgtggggggcaagatcgtgggctcgctgtgtgccatcgccggggtcctcaccatcgccctgcctgtgcccgtcattgtctccaacttcaactacttctaccaccgggagacggaccacgaggagcaggccgctctgaaggaagagcagggcagccagagccaggggacagggctggacagcggaggccctcggaagaccagctggagcaaggggtccttgtgcaaggctggagtgtccctggagaatgcagacggagcccgaaggcagctgcccctggagaagtgtaacctcaaggccaaaagcaatgtgcacttgcggcgatccctctatgccctctgcctggacacgagtcgggaaacggatttgt

SEQ ID NO: 215891 - DNA, 600 bp, Canis familiaris
agattggtctgatctaaccaaacaattgtactcaggaaacgaagcagcgagtaagctgaaggttaaagacccttcacctcgacgctgcccccacggtggagaccacaataattgcacatcgtccccatgtgagaaaggtccctccccactggatactgctggggtatgcggtctgtctccagccactctgatcccacgtggtcagatacagcagtcctcatgtgagtcaaactcattttaccaaatctgccgtttatggacaccatcaaaaagacactaatttggctgttagaacccagcatgggagaatgccagttgcttggagagatgaggaattgaaagctgttgtacatttatgcagaagctcatattcgaaactatttctctgatttctttgcaagtctcctgatggtcatttgtgttagattacatcagaccgatggacaaccattggtattcatctgttttaactctgcttcttttcatgtttgtctatgacggccacagcctaaagcacacacagctgtgacttgatttgaaagaaaatgttttaagatgcagcaagctaatacagaatgattaaaatatctcaggctaaaa

SEQ ID NO: 215892 - DNA, 789 bp, Canis familiaris; identical to SEQ ID NO: 5785

SEQ ID NO: 215893 - DNA, 167 bp, Canis familiaris; identical to SEQ ID NO: 5786

SEQ ID NO: 215894 - DNA, 1166 bp, Canis familiaris; identical to SEQ ID NO: 5787

SEQ ID NO: 215895 - DNA, 692 bp, Canis familiaris; identical to SEQ ID NO: 5788

SEQ ID NO: 215896 - DNA, 273 bp, Canis familiaris; identical to SEQ ID NO: 5789

SEQ ID NO: 215897 - DNA, 130 bp, Canis familiaris; identical to SEQ ID NO: 5790

SEQ ID NO: 215898 - DNA, 187 bp, Canis familiaris
gttgtgtgatgtggcccatcagtatggggctctgactttcgtggatgaggttcatgctgtagggctatatggaccccagggtgctgggattggggagcgtgatggagttatgcacaagattgacattgtctctggaactcttggtaaggcctttggctgtgtgggtggctacatcgccagcacccgt

SEQ ID NO: 215899 - DNA, 600 bp, Canis familiaris
ctctctgtgactatcataaaaaaatatatatatatttctgtatccccagtcttagcccagtgcctgctaggaagtgtgagttaacaaacatttgtgactgactgaccaactagatggatgaatccctattcccagtgtgcacagccaagataatattatttactggtggctcaagtgagcacccaggaactcctgtaaatacttcacgagcatcattttcctctttgatccttcatgatccacccagtgagagaggtgctaccagtctccccctcttgaggagggacactgccgaggacacagaaggaggttaggagaatgcctgtggtcttactgccacttagcagcagtgtgggaagaggacctgggatggggaggcggggcggtcggtcgcatgctggcgcccacttgcctaggcacccttccacaatgcctggctaccccgagcttggacgatgtggctgctgaatgggtccaagcactgatggctgcctggactgcacaacctttaggtcactgaggatcttttctgttccagtccagtccagccctagcagcttctgccaggaacctggacgaggaggtggggaggtgggatcc

SEQ ID NO: 215900 - DNA, 600 bp, Canis familiaris
agtgggcgcagtggttcggccacagcggctggccgggctacgtgcgcccgatcccccccgcggtcgagggccccgccgcggccgccgcggccgccgcgcccgcctacagccgcgcgctcagccggcagctcagcagcggcgtgtcggagatccggcagacggccgaccgctggcgcgtgtccctggacgtcaaccacttcgcccccgaggagctgacggtcaagacgaaggacggcgtggtggagataactggcaagcacgaagagaggcaggatgagcatggctacatctcccgccgcctcactcccaaatacaccctgccccctggtgtggatcctaccctggtctcctcctccctgtcccctgagggcactctcacggtggaggctcccatgcccaagccagccacccagtcggcagaaatcactattcccgtcaccttcgaggcacgtgcccagattgggggcccagaagctggaaagtcggagcagtctggagccaagtaaaggccttagccctgcttagcccacatcctcacctcagtagccatcactgaccgtccctgcacactaaagttcaaagcaacgtgccgtcgacgcg

SEQ ID NO: 215901 - DNA, 600 bp, Canis familiaris
ccccactttccgctccagcctcttcctgtgggtccgagctaacagctacgtggggcctctgatggcaggacggcggccctctgccctgagcctgggtcgtgggcaggacctgctaggtacggtgggcgttaggtactccagccacagcctctgaggcgacggtgggcagtttggggaccttgagaggctgtgatgggccctcctatcaggatcttgctgggggtgggtgggcagggagcacaggattggggggaggccttaagcaccttttctgggtcagaagcctcctctccgcattgcatgtgcaacctcagtgaagcagcatgggcaggggagccggacgggccacccaacagagctccttatgctgcaggaggggttcacagaccactcggacatcaccatcaccttggggggggtgcttgagggaaaagcaaattgaacagagcgtgattctcacgtgcaggtacctaagggaactggggaagagatgcaccaagacgagagccctcgtcatccctggggagcccaagcctaggggttttcttcctcttcccgtttagcattttccaccatcgtatgttacttgtataataatta

SEQ ID NO: 215902 - DNA, 1400 bp, Canis familiaris
tgctaccaagaagtcagatggaaaaattgatgtttctattgaaggtgcttctggtggcaaagccgaggttatcacatgtgacgtactcttggtttgcattggccgacgaccctttactcagaacttgggactagaagagcttggaattgaactagatcctagaggtagaattccagtcaataccagattccaaactaaaattccaaatatctatgctattggtgatgtggttgctggtccaatgctggctcacaaagcagaggatgaaggcattatctgtgttgaaggaatggctggcggtgctgtgccaattgactacaactgtgtaccatcagtgatttacacccaccctgaagttgcttgggttggcaaatcagaagagcagttgaaagaagagggcattgagtacaaggttgggaaattcccctttgctgctaacagcagagctaagacaaatgcggacacagatggcatggtgaagattctggggcagaaatcaacggatagggtgttgggagcacacattctgggaccaggagctggtgaaatggtgaatgaagctgctcttgcactggagtatggagcatcctgtgaagatatagccagagtctgccatgcgcatccgaccttatcagaagcttttagagaagcaaacctggctgcatcattcggcaaatcaatcaacttttaaattagaagattatatttttctgcaaatttcctgggagctttgtggaggtacattcctgtacaggaaatgctcacgttctccaagaatttttaggactgaattatgaaacttttggaaggctttactaggtttggacagaatggaataatctcatctattttaaataaatttaatattttgtttcagtgcattaatattgcagaaaaaagctacttatcgtagtatcctggaaaattttcttcaacccttattttcatgcattttctgaaagattcaatttcactgaatttatgttaccgtagcttttatccctgctattgtaaagttggatttacttatgtgatggagctggtgtagagtatgtgaaccagctgtgtttgaagccaggtgaccaagttattttaaacttggttttcatattggaaatagttaatcattagagtaagattaaaatatgtataaaccaaaatgatgtaaataaatgatggtctctcacatctttatttaatctccaaattcttgcagtttagaggtagaatttatgtttaaatttttaaggacccattgaggtctagtctgtaggcagttaaccaaattaaggaggtagatctgtgaaattcatatattaaatgaagacacaaatgtattacaacggggaatgaaaatacagaaataaacagtcttaaatattcaaaaaaaaaaaaaaaaa

SEQ ID NO: 215903 - DNA, 96 bp, Canis familiaris
tgtggggcctgggtctgctaccagtatcctggatatcgcgggtatcaatatatcttggaatgtgaccatcatggaggagactataaacactggaga

SEQ ID NO: 215904 - DNA, 600 bp, Canis familiaris
gctgctcatagccgccgccctcaccacccaggtgctcacccagccagatgcaattatttctccagtcacctgctgctatacactcaccaataagaagatctcaattcagaggctggccagctataaaagagtcaccagcagcaagtgtcccaaagaagctgtgatcttcaagaccgtcctaaacaaggagatctgtgctgaccccaaacagaagtgggtccaggattccatggcacacctagacaagaaaagccaaacccaaactgcaaagccatgaatactcactctgaaatggaagaatctgaaactaatttattttcttctaaccttccctaaatgccctctgatattattttattataatttcaaagagtacaaactttgtttattgatatgcacacaatgccttaagtaatgttaatcttatttaaattattgatgttttaaatttattttccccaaatactagtgtattttttaaaatatggagacttgaaataaactgctttcctctgggggccccagttctacccctgggatggtgtgagggtccttgcaaggatcattaatgcaagactatgttttaaattctaaagcata

SEQ ID NO: 215905 - DNA, 1400 bp, Canis familiaris
ctgtgaatttggagaatgaacattcttatctgtgcaccgtgacctgtggacataagaaattggaaaagggaattaaggtggacctctactcattccctagagatccagaggttgagatgagtggtctactagtggatggaaacccagtcactgtgagctgcgaggttcctaatgtgtatccttctgaccgactggagattgaattatttaagggggagactatcatagaaagtaaaagctttctggaggacatggacaagaaatctctagaaactaagagtttggaaatgaccttcatccccaccacagaagatactggaaaagttcttgtttgtctggctaagttacatattgatgaaatggaatttgaacccaaacaaaggcagagtacacagacactttatgttaatgttgcccccagggatacaaccgtcgtggtcagcccctcctccatcgtggaggaaggtagtcctgtgaacatgacctgctctagcgatggccttccagctccgaacatcctgtggagcaggcggctaagtaatgggcgcctgcagtctctttctgaggatccaattctcaccttaacttctgcaaaaatggaagattctggtatttatgtgtgtgaagggattaaccaggctggaataagcagaaaagaagtagaattaattatccaagttgctccgaaagacatacagcttatagcttttccttctgagagtgtcaaggaaggagacactgtcattatctcctgtacatgtggaaatgttccaaaaacttggataatcctgaagaaaaaagcagagacgggagacacagtgctaaagtccagagatggtgcatataccatccacaaggtccagttagaggatgcgggagtgtacgaatgtgaatctaaaaatgaggctggcttgcaattaagaagtttaaccctcgatgttaaaggaagagaaaataacaaggactatttttctccagaactactcgtgctttattgtgcatcttccttgataataccagccattgggatgatcatttactttgccagaagagccaacatgaaggggtcatacagtcttgtagaagcacagaaatcaaaagtgtagctaatgtttgcaatggtcaactagagacactatttatcagtccaaattcttaatactgctcatcattccatgagggaaacaaactaagagtccagacttccctgaatgtagtgaattcttggaaagaaatggcttcctgtgccccatgctgtgaggatcaagaggctaaaagaaaactttctgcctgaaaaataggcactgccactgaaatgtattgactggagtagctccttgatgtgtatatacaataacatgatctgtacatatgtaaaataaatttatgccataggagga

SEQ ID NO: 215906 - DNA, 600 bp, Canis familiaris
taaaatgatgctgtgtcaaaattaataactacttttacattctttaatggacaagtataacaggcacaaggctaatgaaaacgtgttgcaatgacataacaatccctaaaaatacagatgttcttgcctcttttttctattataattgagttttagcaacatgttatgctaggtagaatttggaagcacttccctttgacttttggtcatgataagaaaaattagatcaagcaaatgataaaagcagtgttttaccaaggattagggatactgaacaatttcactatggtaactgaatggggagtgaccaagggtaaaaatattaaagccaaggcaaaggcagcagattagaatggattaaagagagtttataatttgtttgcatttacttgatggtttatctcatggattcatgagtcaagaaaggtgcgtaggacaggccagggattccagttataacacattattcacccaaaggctgtgagaaataaccaaggaaacattcagacttttaactgttttatctttccaatttcatgttctttaattctgtatgagtattgggagtggattagcacaatagaggcatatgttgcttta

SEQ ID NO: 215907 - DNA, 1400 bp, Canis familiaris
aagagctcaagaaggaaaaagagaaaacggaatcaaggaaggagaataagaacgaagagagaagaaaggggaagaaagaaaaagaggatgagcggaaggataagaaaattgctgatgcagatatatccaggaaagaatctccaaagggtaaaaaggacagagagaaggagaatgtgggcctagacaaaagtgctaaagccaaggaaagtaggaaaaagtcaacaaatgtaaaggatgcttctagtaaaacggcatccagagacaaagatgacacaaaggaaggtaaaacctctagcaaacacacacactcagcgaagggaaataaccagaagaggaagaactgaaagctctaataccatcatcccaggaaatggtaatgttcctcatcacaatttactgctatagggcagaaaaaatatagtatcgctctggtcggggaaggtatgtcaaatagccattgagtgtatttattggtgctcagtatgtaaagggtttgaaattttagatacactgtctcatgcctctcagtttaaaagatgaagcttgtaaaaaccatgtaataaaaatgtgatataatagcttctgtttttattaatttattgatcatgtatccagataaatgtatatacatgtaatatgaattgtaatgtacttattaatcaatggaatactttcaccagggttaaatgttaagattttccgtagtgtgtatatgcagaatgccgttccagtatgacagatggttaggtgacagaggttttcttctttctccctttatgtgacctttgtcgtcttttctcctttcccttcctgcttccttgcttccctttcttcttcacctggctgtctccctctccccttctctcttcttcctcatcctctctcccccttcttcaggttcttccctggattctccttttccttctccctctcgtcccctactaggtctcccctccccagtcttattggctcttttatacctcctccttctgtctgtgcctcctggctacccacccccctcaagagcctgctcctcctcccaacttgctttggccactcagtgaatattttgtgtttcttgtgtgctacacacactgttctgagaactctggatacagtcatgcataaaagaaagaatttgtcttagaagaagagttttagaacacttttattgatatcttcacagattcagatgagttacaaaagactaagtatttcaaattaggatattctttaatcttttatcacacaattttcccattattttggtgggagtggcatatatttttcatatttgtatgtattatggtttaccatttctaaggagcttgaaatttgagatctaactagagatcagaactcaatcagaaaacatgtaataaaatgaaatttcaataaga

SEQ ID NO: 215908 - DNA, 261 bp, Canis familiaris; identical to SEQ ID NO: 5801

SEQ ID NO: 215909 - DNA, 265 bp, Canis familiaris; identical to SEQ ID NO: 5802

SEQ ID NO: 215910 - DNA, 1400 bp, Canis familiaris
agcacaaccttttcatgggtgaaaatcaattcaatgtacccaagaaacctgagattgtgacttttgacaccatctttggaagatttggcgttttcacatgctttgatatactcttctatgatcctgctgttactctggtgaaagatttccatgtggataccatagtcttcccaacagcatggatgaatgttttgccacatttatcagctattcaattccactcagcttgggcaatgggcatgggagtcaacttccttgcatccaatatacatcacccctcaaaaagaatgacaggaagtggcatctatgcacccgattctccaagagcatttcattatgatatgaagacaaaagagggaaaacttctcctctcacaactggattcttatacacatcaccctatcgtggtgaattggacttcttatgccagtggtataaaagcattcccaacagaaaatcaggaatttacaggtactgctttttttgatgaattcaccttcttggagctcacaagagtcacaggaaattacacagtttgtcagaaaaaactctgctgtcatctaagctacaagatgtctgaaaagagaacagatgaagtttatgccctaggggcgtttgatggactacatgttgtcgaagggaggtattatttacagatttgtactctgctgaagtgtaaaacagcacatgtacatacttgtggtggtgcagttgaaactgcttctaccaggtttgacatgttttccctcagtggtacttttggaacccagtatgttttccctgaggtgttgctaagtgaaactcagcttgcacccggagaatttcaggtgtcaagtgacggacggttgtttagcatgaagccgctatctggacccctcttgaccgtgactctgtttgggagaatatatgagaaggaccagacattaaaggcttcatcagatcccaggtcacaagtaccaggagtaatgctcttagtcataataccaattgtgtgctcattaagttggtagaatattttcatttgttctcttttattttgtgtaatttaaaaaatgatggatgagaaaagaatgaagacgataacagtggtcatggtctcttgtacaagcaaatacaagtatattttcatatatagttcactgttttttagacacacacacacacacaccccccagataatagatgccggataaactgtgacataattttgaaagtaaaatctataaaatgagagtaacagttttacccatattttacaggatttcttggggtgagaattaaataattgaatacatttaaagtccttaggcaagttttctgggtctggtatgtgtgctcgctattataactgtgtgactatcacaataaaagcacgtgtgatataaaaaaaaaaaaaaaaa

SEQ ID NO: 215911 - DNA, 600 bp, Canis familiaris
gcacttcgagggggctacagcaccccccagacgctggccaatagggaccgctgccgtgtggcccagttagcgctactggatgggccctttgcggacttgggggatggtggttgttatggtgatctgttctgcaaagctctgaaaacatataatatgctttgttttggaatttaccggctgagagatgctcacctcagcacccccagccaatgcacgaagaggtatgtcatcaccaatcccccttacaggtttgagctcgtgccgacagacctgatcttctgcttgatgcagtttgaccacaacgccggccagtcccgggccagcctctcccattcctcccactcgtcccagtcctccagcaagaagagctcctccgtgcactccatcccgtccacggcaaaccgacagaaccgacccaagtcccgggagtcccgagacaaacagacagaaaagaaatggtttacagatgaaccggataatgcctatcccagaaacattcaaatcgagcccatgagtacccacatggctaaccagatcaaccaatataaatccacaagcagcttgattccaccaatcagagaagttgaagatgaatgttga

SEQ ID NO: 215912 - DNA, 594 bp, Canis familiaris; identical to SEQ ID NO: 5805

SEQ ID NO: 215913 - DNA, 600 bp, Canis familiaris
gagttctacgtggacctggagaagaaggaaactgtctggcggctgcctgtgtttagcacatttagaagttttgacccacagggtgcactgagaaacttggctataataaaacaaaacttgaacatcatgactaaaaggtccaaccaaactgctgctaccaatggggttcctgaggtgactgtgttttccaagtctcctgtgatgctgggtcagcccaacaccctcatctgtctcgtggacaacatctttcctcctgtgatcaatgtcacatggttgaagaataggcactcagtcacagaaggggtttctgaaaccagcttcttcgccaaaggggatcattccttctcaaagatcagttacctcaccttcctaccttctgctgaggatatttatgactgcaaagtggagcactggggcctggatgagccacttctgaaacactgggaacctgaggttccaacccctatgtcagagctgacagagactgtggtctgtgccctggggttggctgtgggccttgtgggcatcgtgatgggcaccgtcttcattatccaaggcctgcgctcaggtggtacttccagacatcaaggacctttgtga

SEQ ID NO: 215914 - DNA, 600 bp, Canis familiaris
cttcctatgcagcccttatgtttcccttgcatgggaactcacgttctgctcacatttcgttatgagcttttctcaaataaacatggggttgagtgcttgcctttagctccgagcgtgatcctggagtcctgagattgagtcccacatcggtctccctgcatggagcctgcttctccctctgcctgtgtctctgcctctctctctgtgtgtctctcatggataaataaataaaatctttaaaaaagaagaaaaagagagaaagaaagaaagaaagaaagaaagaaagaaagaaagaaagaaagaaagaaagagagagaaagaaagaaagaaagagaaagaagaaagaaaaaaaaaagaaagaagaaagaaagaaagaaagaaagaaagaaagaaagaaagaaagaagaaagaaagaaagaaagaaagaaagaaagaaagaaagaaagaaagaaagaaagaaagaaagaaagaaaagaagaaaagaaatgcaggttccacttcaaaatggtgacatatgaagatcctgaacttacctcttcccacagacacactggatctgtagctacaggtagagtcttttcctctgaaaagaaaaaagta

SEQ ID NO: 215915 - DNA, 1184 bp, Canis familiaris
atggtgtgtctgtgttttcttggaggctcctggatgacagctctgatgctgatactgatggtgctgaaccctcccttcgcttgggccagggacaccccaccacatttcttggagatgttaaagtccgagtgctatttcaccaacgggacggagcgggtgcggttcgtggaaagatacatccataaccgggaggagaacgtgcgcttcgacagcgacgtgggggagtaccgggcggtcacggagctcgggcggcccgacgctgagtactggaacccgcagaaggagctcttggagcgggcgcgggccgcggtggacacctactgcagacacaactacggggtgggcgagagcttcacggtgcagcggcgagtcgagcctacagtgactgtgtatcctacgaagactcagaccttgcagcatcacaacctcttggtctgctctgtgaatggtttctatccaggccacattgaagtcaggtggctccggaatggccaggaagaggaagctggggttgtgtccacaggcctaatccgtaatggagactggaccttccagatcctggtgatgctggagatagttcctcagagcggagaggtctacacctgccaagtggagcacccaagtttgacaagccctgtcaccgtggaatggagggcacagtctgattctgcacagagcaagatgctgagtggaatcgggggctttgtcctgggtctgctcttccttgcagtggggctgttcatctacttcagaaatcagaagggacactctggacttcagccaacaggactcctgagctgaagtggagatggtgaccctcaagaaaaaaccttcctttccagcttcttctcagagtccaaaggtttccagcttggcttggctcttattcttctacaaatacagcgctttctcaggatctggtttgccctggcttcagtgaccctgcacagcttgtgttccccaatggctccctctgccctgtccttgacctggaacccccagtgctgactgcagtaccttatctgcattctctccttcctcttcctatgcagcccttatgtttcccttgcatgggaactcaccttctgctcatgtttctttataagcttttctcaaataaatgtggattgaaaatcatctgcttcatgtgttttcaagaagagaagtaaaaaaaaaaaaaaaaa

SEQ ID NO: 215916 - DNA, 600 bp, Canis familiaris
aaatgcaggtataggctgataatattttgatatcttaggtaaggataatggttctctcttcctgttattctcatgtttgggtactgccacactcccccaattcagacaccaagaaaagtaatataagccctctgaccttggtgtaaatttggtatagaagaaatacaaagccaagaaataagttcatacttcttttaacataattttagaaagctatgacagagaaataagttaagataaagaaattttgaatttcaaagtaccaaaagacaaactgttttccaaaactttaaaatttcaatttgtgaagaatgaatgatgataggagaagctttcctctcccatcctcacccatgaaaagataagaattctttaggcaggaaaataaatggaagtcgggtaagagagcattagaataagaccataaagtaagtaactgaggacaggtacttagggacagcaacaacaggatgagaaaggggagtagaatcatagacatggttaagtttcttagaacacaggtgtagtttgcctcacctcttacatgaatctcttctagataagcacgtcgactttcctgtgccgtggtggcatatcagg

SEQ ID NO: 215917 - DNA, 600 bp, Canis familiaris
tacaagagaaattttgacactggcctgcaggaatacaagagcttacaagcagaacttgatgagatcaataaagaactctctcgcctggataaagaattggatgactatagagaagaaagtgaagagtacatggctgctgctgatgagtacaatagactgaagcaagttaagggatctccagattacaaaaataagaggaattattgcaagcagttgaagagcaaattgtcccacatcaagaagatggttggagactatgatagacagaaaacatagaaggcagatgccacacagtttgagagattgtgaagtatttgacatatctgcaacgttgtcagaaggcagaatgactttggatttcgaacccaggaggccagatctttgtgatcattacaaagttttggtagctttaatatcatcagtattgaagcattttacacatagcttttgataatcaactgggctgaacactcccgattaaggattctgtgctttagactttggctgttgtgctaaaggactgagtataggtggaggttttcagaccttggaagaaggtcccacggtgaacttgtgctgtgaacttgcacacttggggca

SEQ ID NO: 215918 - DNA, 600 bp, Canis familiaris
acagacatcacggtcatctgcccttgggaggccttcaaccacctggagctgcacgagctggcccagtacggcatcatctagcgccagagcctgacccagaggcttggggccagggtccctgccgcccactccgctccctgctccgggtgcctgcgaggaggccggcccccccccgcggtgtccagatggcccagtgtgtgtctggagaccctcgcagggtggcagcctcagcccccagacgcccattaccagaagcccaccagctccctgcaggacccctcgggccctgcttcactaccacaaacaccggcccacagaccttctcttagggcaggaaggccaggcaggtgtcccaggaatgtgcatcacaccccgctcccctcctttggtctagtgacgaggacgagcccccctcactagtcttcccagctggcgcccttgagctgagtgggcaaggggggggggtccccggcggcctcagagcagcagccctctgaagccaacacagcagcaggaagcatcctgtccagcattgcccatgcttgctgtccctgtttcagagtaaagttagtgtggcccccaaaaaaaaaaaaaaaaaaa

SEQ ID NO: 215919 - DNA, 600 bp, Canis familiaris
gctcgaaggctaggtcctggccttgccctctgatcctgatggcttcctccttcctccctctgactcctgggtgagctgtggactcagactcccagcagactcctttctgtctcagcctccccgaccccaaccccctcactgttctgtacccccatatagtcagggcccccgacatctccagaggaccttcatcacaagccatctcctctgtaggtggcccaggttctcatttatttttttaggtattttttttttccagaggggtgagcagagatcttggtttcaatgacggttggaaatagaactttccagagataggaagactgggtggattttatttctgaatacaaaaatggtgtgtgtaaatactgtaattaaagtgataccgagacacatctgttctgtgtcgctgccccagccaggtgtgtctgaatgccacggcggtgtccctggtgtcccggtcagacccggccagacttcccaatgatgtggtagagaggggtgaccctggaaagaggtgggcccatctcgggggatacaggcaaaagccagggtgctgccccttggccaagtgtccctatgggtggggggggttggagg

SEQ ID NO: 215920 - DNA, 600 bp, Canis familiaris
actaatctaatttctgaagagacaactcatgtcattatgaaaacagatgctgagtttgtgtgcgaacgaacactgaaatattttctgggtattgcaggaggaaaatgggtagttagctatttctgggtaacccagtctattaaagaaagaaagatactagatgagcatgattttgaagtcagaggagatgttgtgaatggaagaaatcaccagggtccgaagcgagcaagagaatcccaggacagagaatcccaagacagaaagatcttcaggggcctagaaatctgttgctatggaccctttaccaacatgcccacagatcaattagagtggatggtgcacctctgtggggcttctgtggtgaaggagccttcgttattcaccctcagcaagggcactcatccagtggtagtcgtgcagccggacgcctggacagaggacagtggcttccatgcgattgggcagatgtgtgaggcacctgtggtgacccgagagtgggtactggacagtgtagccctctaccagtgccaggagctggacacctacctgatcccgcagattcccagaactgctgcagactccagccagccatgcgtgtaa

SEQ ID NO: 215921 - DNA, 1226 bp, Canis familiaris; identical to SEQ ID NO: 5814

SEQ ID NO: 215922 - DNA, 600 bp, Canis familiaris
tgtccacctgggaccaaaattctttaccacgggtactccttgctctacgtgcaaggcaacgaacgagcccatggccaggacttgggcacggcggggagctgtctacgaaagttcagtacgatgcccttccttttctgcaacatcaacaacgtgtgtaacttcgcctcccgaaacgactactcctactggctatccacgccggagcccatgcccatgtccatggcgcccatcgccggggacaacatcaggccatttattagcaggtgcgcggtgtgtgaggcgccagccatggtgatggctgtgcacagccagaccattcagatcccgcagtgccctagcggctggtcctccctctggatcggctactccttcgtgatgcacaccagcgccggcgccgaaggttctggccaagcccttgcgtctcctgggtcttgcctggaagagtttcgaagtgcgccattcatcgagtgccacggccgtgggacctgcaactactacgccaatgcttacagcttctggctcgccactatcgagagaagcgagatgttcaagaagcccacgccatccaccttggaggcaggagagctacgcacacacgtc

SEQ ID NO: 215923 - DNA, 600 bp, Canis familiaris
agacggatcaggaacccatgtgccccgtgggcatgaacaagctctggagtggatacagcctgctgtacttcgaaggccaggagaaagcccacaaccaggacctggggctggcgggctcctgcctggctcggttcagcaccatgcccttcttgtactgcaaccctggtgatgtgtgctactatgccagccgcaacgacaagtcctactggctgtccaccactgccccgctgcccatgatgccggtggccgaggatgacatcaagccctacattagccgctgttccgtgtgcgaggccccagccgtcgccattgcagtccacagtcaagatgtctccatcccccactgcccagctggatggcggagtctctggattggatattccttcctcatgcacacagcagccggcgatgaaggtggtggccagtcgctggtgtcaccgggcagctgtctggaggacttccgtgccacgcccttcatcgagtgcagtggaggccgtggcacttgccactactacgccaacaagtacagcttttggctcaccaccatccccgagcagagcttccagggctcgccctccgccgacaccctcaaggcggggc

SEQ ID NO: 215924 - DNA, 600 bp, Canis familiaris
ctgtccagaagggacagcgccactctatagtggcttttctcttcttttcatacaaggaaatgaacaagcccatggacaagacttgggaactctcggcagctgcctgcagcgatttaccacaatgccattcttgttctgtaacatcaacaatgtctgtaattttgcatctcgaaatgactactcatactggctgtcaacaccagctctgatgccaatggacatggctccaattactggcagggccctggagccttatattagcagatgcactgtctgtgaaggtcctacgattgccatagccattcacagccaaaccactgacattccctcatgtcccaatggctggatttctctctggaaaggattttcgtttatcatgttcacaagtgcaggttctgagggtgctgggcaagcactggcctcccccggctcctgcctggaagagttccgagccagtccgtttatagaatgtcacggaagaggaacgtgcaactactattcaaattcctacagtttctggttggcttcgttaaacccccaaagaatgttcagaaaacctattccatcaactacgaaagctggggagttagaaaagataat

SEQ ID NO: 215925 - DNA, 600 bp, Canis familiaris
ctgccccgcgggcatgcccaggctctggacgggctacagtctgttatacctggaaggacaggagaaggcccacaatcaggaccttggtctggcagggtcttgccttcccatgttcagcaccctgccctttgcctactgcaacatccaccaagtgtgccactacgcccggagaaacgaccggtcctactggctggccagtgctgcgcccctgcccatgatgccgctctcagaggaggagatccgcccctacatcagccgctgtgccgtgtgcgaggccccagcccccgtggtggcgctgcacagccaggaccggtccatcccgccgtgtccacggagctggaggagcctctggatcgggtactcgttcctgatgcacacaggggctggagaccaaggaggagggcaggccctcatgtcccccggcagctgtctggaagatttccgagccgcaccgttcctcgaatgccaaggccgacagggaacttgccacttttttgcaaatgagtatagcttctggctgacgacggtgaggcctgacttgcagttttcctcggcaccatcaccagacaccttgaaagaaagccaggcccagcgccagaa

SEQ ID NO: 215926 - DNA, 600 bp, Canis familiaris
cagaacagctgcccctgtgccctgccgggatgagccagctgtgggtgggttacagcttgctgttcgtggagggccaggagaaagcccacaaccaggacctgggttatgctggctcctgcctgccccgctttagcaccatgcccttcatctactgcaacatcaacgaagtgtgccactacgccagacgcaatgataaatcctactggctctccaccaccgcccccattcccatgatgcccgtcggccaggcccagatcccccagtacatcagccgttgttcggtgtgcgaggcaccctcacaggccattgccgtgcacagccagggcatcaccatcccgcagtgccccctgggctggcacagcctctggattgggtactccttcctcatgcacactgccgctggtgccgagggcggcggccagtccctggtctcaccgggctcctgcctggaggatttccgtgctactcctttcattgagtgcagtggggcccggggcacctgccactacttcgccaacaagtacagtttctggctgacaaccgtggaagagaggcagcagttccgggaggaaccagtctctgaaacgctcaaggctgggc

SEQ ID NO: 215927 - DNA, 440 bp, Canis familiaris; identical to SEQ ID NO: 5820

SEQ ID NO: 215928 - DNA, 600 bp, Canis familiaris
tggccagaatccgattcagagaaccatcaggccagatgtcagaagctacaccatcacaggtttacaacccggcactgactacaagatctacttgtacaccctgaatgacaatgcccggagctcccctgtggtcattgacgcctccactgccattgatgcaccatccaacctgcgtttcctggccaccacacctaactccttgctggtatcatggcagccaccccgtgccaggattactggttacatcatcaagtatgagaagcccgggtcccctcccagagaagtggtccctcgtccccgccctggcgtcacagaggctactatcactggtctggaaccaggcaccgagtacaccatccaagtcattgccctcaagaacaaccagaagagtgagcctctgattggaaggaaaaagacagaatggtgccatgataatggtgtgaactacaagattggcgagaagtgggatcgtcagggggagaatggccagatgatgagctgcacatgtcttggaaatggaaaaggagaattcaagtgtgatcctcatgaggcaacgtgttacgacgatgggaagacataccatgtgggagaacagtggca

SEQ ID NO: 215929 - DNA, 600 bp, Canis familiaris
ctacaggacaagaagctctctctcagacaaccatctcttggactccattccaagaaagctctgagtatatcatttcatgtcatccagttggcattgatgaagaacctttacagttccgagttcctggcacttctgctagtgccaccctgacaggccttaccagaggggccacctacaacatcatagtcgaggcactgaaagaccagaagaggcacaaggttcgggaggaggttgttaccgtgggcaactctgtggaccaaggcctaaaccagcctacagatgactcgtgcttcgacccctacacggtttcccattatgccattggagaggagtgggagcggttgtctgaatctggctttaagctctcgtgccagtgcttaggctttggcagtggtcatttcagatgtgactcatctaaatggtgccatgataatggtgtgaactacaagattggcgagaagtgggatcgtcagggggagaatggccagatgatgagctgcacatgtcttggaaatggaaaaggagaattcaagtgtgatcctcatgaggcaacgtgttacgacgatgggaagacataccatgtgggagaacactggcaga

SEQ ID NO: 215930 - DNA, 1400 bp, Canis familiaris
cagatgcggacacggcggacgttaaggggacacctagccaagatctatgccatgcactgggccaccgattccaagctgctggtaagtgcctcgcaagatgggaagctgatcgtgtgggacacctataccaccaataaggtgcatgctatcccactgcgctcctcttgggtcatgacctgtgcctatgcaccatcagggaactttgtggcatgcggggggctggacaacatgtgctccatctacagcctcaaatcccgtgagggtaatgtcaaggtcagccgggagctgtctgctcacacaggatatctctcctgctgccgcttcctggatgacaacaacattgtgaccagttctggagacaccacttgtgctctgtgggatatcgagaccgggcagcaaaagacggtgtttgtgggacacacgggggattgcatgagtctggctgtgtctcctgacttcaaactcttcatttcgggggcctgtgacgccagcgccaagctctgggatgtgcgggaggggacctgccggcagactttcactggccatgagtccgacatcaatgctatctgttttttccccaacggagaggccatctgcacaggctcggacgacgcctcctgccgcctgtttgacctgcgggctgaccaggagctgactgcctactccgacgagagcatcatctgtggcatcacatctgtggccttctccctcagcggccgcctgctctttgcaggctacgacgacttcaattgcaacatctgggactccatgaagggcgagcgtgtgggcatcctctctggccatgacaacagggtcagctgcctaggggtcacagctgatgggatggctgtggccactggctcctgggacagcttcctcaaagtctggaactaaggaggctggacgaggggaggtaaaagaccatgaagacactcagctaccccctcccctcccctgcccaatttttcttctgaggtttctttattgtttttttctatacctcagctgccattcccacccagctttgtcctttgagggcagtggggaaaatggggagtatgcctttgggagacagcatcagggacacagggcaaagaaatgctccatctcctcccatggcctcccctctccatggtcctgcagcttctcccttaatgagcaaggacaactgatccctccccagcccttggcaggcctagcaggcttccagtctgaggccccaggccctagaattcctccccggagccactaactttgtccagacctgggtggcagaggtgtcagctttgtgactatggctctggcatcactaggatcctagcccccttcctcatgatttttcttctctccctttatttctctcctaaaggacctaaaggacaataaagtgtagcacccta

SEQ ID NO: 215931 - DNA, 936 bp, Canis familiaris; identical to SEQ ID NO: 5824

SEQ ID NO: 215932 - DNA, 936 bp, Canis familiaris; identical to SEQ ID NO: 5825

SEQ ID NO: 215933 - DNA, 600 bp, Canis familiaris
gcctatgaccgctatgtggccgtgtgtgaccccctgcgatactcggtcatcatgcacggagggctctgtactaggttggccatcacctcctgggtcagtggctctatgaactctctcatgcagactgtcatcacatttcagctgcccatgtgcacaaacaagtacattgatcacatatcctgcgaacttctagctgtggtcagactggcttgtgtggatacttcctccaacgagattgcaatcatggtttctagcattgttctgctgatgacacctttctgcctggttctcctgtcctacatccagattatctccaccatcctaaagatccagtccacagagggaagaaagaaagccttccacacctgtgcctctcacctcacagtggttgtcctgtgctatggtatggcgattttcacttacatccagccccgctccagcccctctgtccttcaggagaagttgatctctctcttctattctgttttgacaccaatgctgaaccccatgatttatagtgtaaggaataaggaggtgaagggagcctggcagaaactattagggcaattaactggaataacttcaaaactagcaacttga

SEQ ID NO: 215934 - DNA, 600 bp, Canis familiaris
gacaatttcctcctgactgtgatggcctatgatcgctacatggccatctgctaccccctgcactacatggtcatcatgaaccctcagctctgttcactactactactggtatcctggatcatgagtgccttgcattctttgttacaaaccttaatggtgttgcgactgtccttctgtacacatttccaaatcccccactttttctgtgaactcaatcagatgatccaacttgcctgttctgacacctttcttaataacatgatgttgtattttgcagctatattgctgggggttgctcccctggttggagtcctttactcttatttcaagatagtttcctctatacgtgggatctcatcagctcacagcaagtataaagcattttccacctgtgcttctcacctctcggttgtctccttattttattgtacaagcctaggagtgtaccttagctccgctgctccccagagcacccacacaagttcagtggcctcagtgatgtacacagtggtcacccccatgctgaaccccttcatctacagcctcaggaacaaagacataaagggagctctaaatgtatttttcagagggaagccataa

SEQ ID NO: 215935 - DNA, 1400 bp, Canis familiaris
ggccctggccgtgaccctgacccgggcgggctcccactccctgaggtttttccacaccgccgtgtcccggcccggccgcggggaccccctctacatctctgtgggctacgtggacgacacgcagttcctgcggttcaacagcgacgcggcgagtccgaaggtggagccgcgggcgcggtggatggagcaggaggggccggagttttgggaggagcagacggagatcgccaaggtgcacgcccagacctcccgatccaacctgcagacggccctcggctactacaaccagagcgaggccgggtctcacaccttccagtggacttcgggctgcgacgtggggccggacgggcgcctcctccgcgggtatgagcagttcgcgtacgacggcgccgattacctggccctggacgaggacctgcgctcctggaccgcggcggacgcggcggcgcagatcacccggcgcaagtgggaggcggcgggcgcggcccagtactaccgggtatacctgcagggggagtgcgtgcagtcgctccttaagtacctggagagagggaaagagaccctgcagctcacagatcctccaaaaatctacctgacccgccaccccatctctgaccatgaggtcaccctgaggtgctgggcgctgggcttctaccctgcggagatcaccctgacctggcagcgggatggggaggaccagacccaggacacagaggttgtggacaccaggcctgcaggagatgggaccttccagaagtgggcagctgtggtggtgccctctggacaggagcagagatacacgtgccacgtgcagcatgaggggctggcggagcctgtcacgcggagatgggagccttcccctctgtccaccattgtcatcgtcagcattgctgctctggttctcctcgtggtcgctggggtgattggagctgtgatctggaggaagcagcgctcgggaggaaaaggaccaggctactctcatgctgcacgtgatgacagtgcccagggctctgatgtgtctctgacagctcctagagtgtgagaccagctgccctgtggggactgagcgatgcaagatgtgttcacatctcacgtgatgacatcaacaaccctggcttgtctctgcaaacagtgtcaggatgtgcctgtgtccctaggagcataatgtgaggaggtggggagattggcccaccctgcccaccatgacctgtccctaatctgatgtgcgctctcttctctgatgtgctttcctgtccaggagagggagggctggaccatctccatccctgtctttgtttcatgttgagtactaatgacttactacccgattgaaaataagaatcccgatatgagtttgtgtttcctgagtcttgggatgtggggctgatgaggtaataaaa

SEQ ID NO: 215936 - DNA, 859 bp, Canis familiaris
atcccccaaaggcactctcacccaccaccccttctctgactgtgaggtcaccctgacctgccaaatgggatggggaggaccagacccaggacacagagcttgtggagaccaggcctgcaggagatgggaccttccagaagtgggcggctgtggtggtgccctctggacaggagcagagatacacgtgccacgtgcagcatgaggggctggcggagcctgtcacccggagatgggagtcccctcctcggctcaccatccccatcgtgggcatcgttgctggtctgcttgtctttgtggtctctggtactatggtggctggagctgtcctgtggaggaagtagatctcaggtggaagaagaattatgctgaggttgcacgcagtgacagtgcccagggctctctctctgcttctactgtgtgaaccagctgcctcgtgggggactgagtgatgcaggatttgttcactttcccaccttgtgatgtcaacacccctgatttctctttctgcaaagggcatgtctgaatgtgtctgaaatatgttcctattaacataatgtgaggaggtgggcagactggctccctccccacgtgactcccctcccccgacagacctgtgttctgcttttgtgttgcttgtgtgttgcagctgagggagagcgggtcatctccatccctgtctttatgttacaccgagctacaacttcttacttccttattgaacataggactgtggatgtgaaattgttttttccagttcttgtcatgaggagctgatcagttagtcagatctgatctgaaaggagaagattcctaaagtttgagagaggaaataaatgggagcactgagactcttccagaa

SEQ ID NO: 215937 - DNA, 1400 bp, Canis familiaris
cctcgtgctgctgtcggtgaccctggccgcggccctgccccgggcgggctccccccccccccaggtacttggaccccgccgtgtcccggccccacacgcaggtggtgcggttcgacagcgactgggccactgcgaggagcagcaggggccggggtatcgggaccaggggacgcggcgggtcaagaagtccgcacgcataaccgagtgcacctggaccccctgcgcggctgctacgagcagagcgaggccgggtcccaggccctccagaccgtgtccggctgtgacctggggccgacgggcgcctcctccgcgggtactggcaggacgcctacgacggtcccctgcaccgggacctgcgctcccggccggcggcggacacggcggcgcagttccccgcgcaagggggaggcggcaggtgctgcggggccgagagcaaccacccggagacgacgtgcgccgcgcggacctggaggacctggagacgcgcagggagacgctgcagcgcgctgaaccccccaacccgcgtgcgacccgccaccccttctcggaccgtgaggtcaccctgcgctgcagggcgctgggcttctaccctgcggagatcaccctgacctggcatgggatggggggagggggggaccagacgcaggacacagagcttgtggacaccaggcctgcaggagatggcaccttcccgaagtgggcggctgcgggggtgccctgtggacaggagcagaggtacaggtgccacgtgcagcatgaggggctggtggagcccgtcacccggagatgggagcctcctcctcctctgtccaccaatctcatcatcagcattgctgctctgattcttgtggtcgctggggtgattggagctgtgacctggatgaagcagcgcttgggaggaaaaggaccaggctactctcgtgctgcacgcgatgacaatgcccagggctctgatgtgtctctgacggctcctagagtgtgaaagcagctgccctgtggggactgagtcatgcaagacgttttcacatctcatgtgatgacatcaacaaccctggctcgtctctttgcaaagtgtcaggatgtgcctgtgcccctaggaacataatgtgaggaggtggggagattggcctgccctgcccaccatgatctgtccctaatctgttgtgcattctcttccttgatgtgctttcctgtccagcagaggcagggctggaccatctccatccctgtctttgtttcatgttttcatgttgagtactaatgacttactacccaattgagaataagaatccagataggagattgtgtttcctaagtcttgggatgtggagctgatgaggtaataaaaggagatttgtgaggttgagagaacaaataaatgcaagccccgagaaccttcg

SEQ ID NO: 215938 - DNA, 333 bp, Canis familiaris; identical to SEQ ID NO: 5831

SEQ ID NO: 215939 - DNA, 267 bp, Canis familiaris; identical to SEQ ID NO: 5832

SEQ ID NO: 215940 - DNA, 600 bp, Canis familiaris
gtgactgctcctgggccctagtgaggacactctagtatggacctaatcagttctgatgtgaacttctgctctgtgataactctttcccactataggtggcaaccagctaccacctcaccaatgcatgccaccagttcacagtatcagaactgggcaaagaatgaaattggtgcccacctttggagaagccctcaaaaccaataggagccagaagccaagagcatctccactgtgactacccttttgaatttcagtatcagataatgtatctcttactttccagaaaatgtcccctggtcctttcattttaattgtgaccagaacttatatttacggtgacaaacttctcaggaccagaatttccaaagatatatggtaaggatgttgctgaaggtccaaggtagtcttctgtgaatcccaaacagaaactgacaatgttatttaggattttgcatgactgcatgttgagagctgccagacaattgctcctgcccaaggtaacacctgtggtctatgtcatgaaagaactttgagatatccattaaaattaatatttttagaggtatatcccgaaaaaaaaaaaaaaaaaaaaaaaaaaaa

SEQ ID NO: 215941 - DNA, 249 bp, Canis familiaris; identical to SEQ ID NO: 5834

SEQ ID NO: 215942 - DNA, 249 bp, Canis familiaris; identical to SEQ ID NO: 5835

SEQ ID NO: 215943 - DNA, 402 bp, Canis familiaris; identical to SEQ ID NO: 5836
  misc_feature (210)..(210): n is a, c, g, or t

SEQ ID NO: 215944 - DNA, 371 bp, Canis familiaris; identical to SEQ ID NO: 5837

SEQ ID NO: 215945 - DNA, 558 bp, Canis familiaris; identical to SEQ ID NO: 5838

SEQ ID NO: 215946 - DNA, 1400 bp, Canis familiaris
gcgccggatggagaccatcagccggcatattgcccagagggcacaccgcgaggtggattacctcttctgtgtcgacgtggacatggtgttccggaacccatggggccccgagaccttgggggacctagtggctgcaattcacccaggctactatgctgtaccccgccagcagttcccctacgagcgcaggcatatttccacagcctttgtggcagagaacgagggggacttctattatggtggggcggtctttggggggcgggtggccaaggtgtacgagtttaccacaggctgccacatggccatcctggcagacaaggccaatggcatcatggcagcctggcaggaggagagtcacctgaaccgtcgcttcatctcgcacaagccctccaaagtgctgtcccctgagtacctctgggatgacaggaagccccagccacctagcctgaagttgatccgcttttctacactggacaaggccaccagctggctgaggagctgacagcagagccagggctccatgaatggggccctaagccccgcagccagctcaccccagcacagcacccagctcgccccagcagccaccttgcatcagtgcctcccttctcgagcctcatgtgagaccagtccagtcttgcctaactcagtctgttagcagaactcacctggaaaatggatgcagaaaggccttcgtacactgtagagggctgcctccccatgaggggaaggcaaagaccacacagccctagaatcaggaagatgggaggcgggtgaagaagtccagggcctggcagcctcacccagcagatgtgcctttggggcaggccctggagtcagccctacactgtgcctgagacccaacctgtgcctcccttctgttgcctctcgcccttaaagttgcacttctaagccgctgctgtgaaaggcatcccagacccctcttctctggctgccgggggtcttggggactgtgaagtcccccagccacacagagccaatccctcgctcagcctgggagtgagcctttgcagcagaacaggcctggctccctctggttgccaggtctaacctgtgccccatggtgggccacactcgctggcaccaaccacctcctttgtaagagggtttgggcagcttttaacaaaggtggtgtgggaggtgcctgaatggctccgtcggttgagcggctgactcttggtttcagctcaggtcatgatctcagggtcttgggatagagctctcctcctcactgccccatccagctccttgctcagtgggcgagtctggttgagcttctctctctccctctgctcctcccccactcacacgtgtgtgcacatttgcacgctctctcttaaataaataaatcttaagaaaagaaaaaaaaaaaaaaaaaa

SEQ ID NO: 215947 - DNA, 195 bp, Canis familiaris; identical to SEQ ID NO: 5840

SEQ ID NO: 215948 - DNA, 179 bp, Canis familiaris; identical to SEQ ID NO: 5841

SEQ ID NO: 215949 - DNA, 163 bp, Canis familiaris; identical to SEQ ID NO: 5842

SEQ ID NO: 215950 - DNA, 225 bp, Canis familiaris; identical to SEQ ID NO: 5843

SEQ ID NO: 215951 - DNA, 203 bp, Canis familiaris; identical to SEQ ID NO: 5844

SEQ ID NO: 215952 - DNA, 264 bp, Canis familiaris; identical to SEQ ID NO: 5845

SEQ ID NO: 215953 - DNA, 333 bp, Canis familiaris; identical to SEQ ID NO: 5846

SEQ ID NO: 215954 - DNA, 600 bp, Canis familiaris
ccaccgacttcaccgagacggagaggtcgcccctgccaccactctccgcctcccacctgcagatgaggttcccccccgacctcgcagggaccgacgagcaccaaagagcccgggggcccccgttcctgatgctcgccagggggaaggggcccgctggcagggatgccatcctggaatatgctccagtcgacataacggtgagcctggatgccagcggttccaaagtgggctcacatggtcccctgcagcccgacagtgcctcggagagccccaagagttcgctgaaaggcagcaaccccctgaaatccagatcgctcagagtgaacttcaaggagaacagaggcagcgccccgcagaccccccccagcacagcccggccgctgcccgtcaccacggcggacttctccctcaccgccccgcagctcatcagcaccatcctcctagaagagaccccctcccagggagacaggccttgctgggcgccgagggctcggcacactgtcagggaccttccaaggggctgtccccccggtttcccaagcagaaactctttcctttctcatcaagagagaggaggagcttcactgaaatagacactgg

SEQ ID NO: 215955 - DNA, 600 bp, Canis familiaris
  misc_feature (583)..(583): n is a, c, g, or t
ggcggccctcgcgcctcgtggcgctgcgcgagcagaaggcgctcaagacgctgggcatcatcatgggcgtgttcacgctgtgctggctgcccttcttcctggccaacgtggtcaaggccttccaccgcgacctggtgcccgaccgcctcttcgtcttcttcaactggctgggctacgccaactcggccttcaaccccatcatctactgccgcagccccgacttccgcagggccttccagcgcctgctgtgctgcgcgcgccgcgccgcccgcgggagccacggggccgccggggaccctccgcgggcccggccgccgccgtcccccggggccgcctcggacgacgacgacgacgacgaggacgacgccggggccggggccggggccgcgccgcccgcgcgcctgctggagccctgggccggctgcaacggcggggcggcggccgacagcgactccagcctggacggcgcgggcagccccgcgggcgcctcggagtcccgggtgtaggcgcgcggcctcccggggggcgcatcggtgtttactccagacccagagcaggtgaaccccgggcccgcgcacccccntcgcattcatcgaggca

SEQ ID NO: 215956 - DNA, 1400 bp, Canis familiaris
tcttttttggaaaatacagactgtttgtttaccagacattcttgtactttttgcataattttgtaagagttatttatcaaaattatgtgaggttccaaaatatgtaaaaattataataataaaaaaagattaacatcccttgtcatcttttttaaatatcctatacacttcagtaagaatctgtatattttaataggtaaatctttacgctcctgttcccttcaaattctgtatcatacattgcttttcgtcagaaataaatcgtgcatttctttcattagttttcggaatcgtcctccgttgacacttgtataataaattaccctcttgatatatcgttttcagcttttatcactagatactgaacgtgattagaatgtctttgaagggttgattactactaatcaactattgtcgtctttgtatggaagaaaataataaaatagttggtcgactattcttcttctactatatgatgtttgtgagaatagttgctcctcctgctgtgtagcaaccatcttgttgattaataataataaaatattatcaccctccttctgagtaattactactactatttcagacgtctttattactacatcatgaagtaatcatcgtagaacagctggtagtatatgaagaatagttgctcttttttatatgagaaacgcggggaaatgcttagattaaaacaagggagattagaaaaaaatagtaaatgattctgagaacaaactatgttccccaaaagcgtgcaaagatctgactatgacaagctccaaataattgcctaaggcaaataaaagtgaggaaaccttcaaatgacattctaatctactgttcagtatctagtgataaacgtcggaacatagtttgttctcagaatcatttactattttttctaatctcccttgttttaatctaagcatttccccctgtttctcatatataagtcatatttggtagataaaacagtatgatttggttggcattttcttcatgattataggagcatcattcatttgtctccagggctacttgtgtgatatagcatatacatctattgaagaaaataatcactctctaggggagggaggtagaaaagtatattctaaacttgggtttttgagtttgtggtcttgtcttaacttttgtgttgctctaactacatgccaatatgtgttctcaagagtttttgttaagtattgtatgaaagtttacagaatgaaggaagttcatctacacttgaatctgtaagcaagataacacacaagtgtaccaagtgattattaactttgttgttttataaatttgtatgaatttggagtatctgttgccattactatatatgtgcaaataaatgtggcttagacttgtgaaaaaaaaaaaaaaaaaaaaaa

SEQ ID NO: 215957 - DNA, 600 bp, Canis familiaris
tgcgcaaatggatactgacatggatcctgccaactttgctctacagatcatgctttcacattatctgtctagtgggcactatatctttagcttgcaatgacatgactccagagcaaatggctacaaatgtgaactgttccagccctgagcgacatacaagaagttatgattacatggaaggaggggatataagagtgagaagactcttctgtcgaacacagtggtatctgaggattgataaacgaggcaaagtcaaagggacccaagagatgaagaacagttacaatatcatggaaatcaggacagtggcagttggaatagtggcaatcaaaggggtggaaagtgaatattatcttgcaatgaataaggaaggaaagctctatgcaaagaaagaatgcaatgaagattgcaacttcaaagaattaattctggaaaaccattacaacacatatgcatcagctaaatggacacacagcggaggagaaatgtttgttgctttaaatcaaaagggggttcctgtaagggggaaaaaaacgaagaaagaacaaaaaacagcccactttcttcctatggcaataacataatcatatatggtatata

SEQ ID NO: 215958 - DNA, 530 bp, Canis familiaris; identical to SEQ ID NO: 5851

SEQ ID NO: 215959 - DNA, 600 bp, Canis familiaris
ctgtacaggttgggcctgggccacaaccagatccgcatgatcgagaacgggagcctaagcttcctgcccaccctgcgggagctgcacttggataataacaagctgtccagggtgccttccggccttccggacctcaagctcctgcaggtggtgtacctgcacaccaacaacatcaccaaggtgggcgtcaacgacttctgccctgtgggcttcggggtcaagcgggcctactacaacggcatcagccttttcaataaccccgtgccctactgggaggtgcagccggccactttccgctgcgtcactgaccgcctggccatccagtttggcaactacaaaaagtagaggcagcggcagccgccgtggtggcctgggccgggtctctggggagcacagcagacatcccgaaggggagggcagagccaaggagccgagccagcgcccagctgcgcccaacccagccccgccctgatcccggaccctgactcgctgcctcctgacgccctcatcctggctcccaagcacgcagatggggcacaagacccagccgcccatcacatgcctgttggcctcagagctgcccctgcccgccccccaccg

SEQ ID NO: 215960 - DNA, 925 bp, Canis familiaris
atgcattgtcttcctctcaccctgctgctccttctcctatgttccagagcagaagctgaggagatcatcgggggcacagagtccaagccacactcccgcccttacatggcccacctggaaatcctcactctccggaatcacctggcgtcttgtggtggtttcctgataaggcggaacttcgtactgacagctgctcactgtgcaggaaggttcataatggtcaccctgggagcccataacatacaaaagaaagaagacacgtggcagaagcttgaggtcataaaacaattccctcacccaaaatatgatgaccttactcttcgccatgacatcatgctactgaagttgaaggagaaggccaacctgaccctggccgtggggaccctccccctctcaccccagttcaacttcgtcccacctgggagaatgtgccgggtggctggctggggaaaaagacaagtcaatggatcaggctctgacactctgcaagaggtgaagctgaggctcatggacccccaggcctgtagacactacatggcttttgaccacaacctccagctgtgtgttggcaatcccaggaagacaaaatctgcatttaagggagattcagggggccctcttctgtgtgctggggtagcccagggaattgtgtcctatgggcagaatgatgcaaagccccctgctgtcttcacccgaatctcccactaccggccctggatcaataaggttctgaagcagaataaagcctgaatggagcctgggcaagcctgaggggaaatctggaaccagacctgagcaggctctctgccacttactctggagctgcctctagtctctactgaggccccactacatccctcagacccaagagggctcctccaggtcacagagtcctcagtaaacctcaataaagatccagcttcca

SEQ ID NO: 215961 - DNA, 1396 bp, Canis familiaris; identical to SEQ ID NO: 5854

SEQ ID NO: 215962 - DNA, 1400 bp, Canis familiaris
cctgatctagacatcatgaacaaaccaccccggaacccgaaggaacctctgatcagtggatggctctttttccgttacctggccattggctgttatgttggcgctgctaccgtgggtgctgctgcatggtggttcattgctgccgacggaggaccaagagtgtccttctaccagctgagccacttcctacagtgtaaagatgacaacccggactttgaaggagtggattgtgcaatctttgaatccccgtacccgatgacaatggcgctgtctgttctagtaaccatagagatgtgtaatgccctcaacagcttgtccgaaaaccagtccctgctgaggatgcccccctgggagaacatctggctggtgggctctatctgcctgtccatgtccctccacttcctcatcctttacgtggaacctttgccacttattttccagatcacaccgttgaatttgacccagtggctaatggtgctgaaaatctccttgcctgtgattctaatggatgagacactcaagtttgtggcccgcaactacctggaacctgcaatactggagtaactgcttcctaaaccattttgcagaaatataagggtgttcggttgcgtgcatgtgcgtttttagcaacacatctaccagccctctgcatgattgatgttgggggaaaaagaaaagtagaaaaaaagtccccaactcattgtgtgttatgtggaggaaacgtgtattaccaacgggtttagcttttaaatcaaaataataattacaaatgtacaacttagcttaatgaatcagaaagcctctccagagaactttggtttctttgctgcaagaagaatgaggttccaaaaccttatctaagaacttagaagccatcagccaagtctccgtgtttctctgtgcaaaatgtcatagtttatataaatgtacaatattcaattgtaatgcatgcctttggttgtaagtagccagatttctctatggtgtcatttaaacatgctactttttaattggccctgtacagtttgcttatttataaatttattgaaaacactacaggtgttgaaaggttagaatgtaggcctccagttcataacttcagttattttttttgagtgtgcaaacagctattttgcactgtattaaatgtaacttatttaatgaaatcagaagcagtagacagatgttggtgcaatacgatattgtgatgcatttatcttaataaaatgctaaacgtcagtttatcacaagcatgtttgactttagactgtaaatagagatcagttgtctatttctgtgctggtaacaagcattgcacagacatggtttcaggtaaataaatctattctacgataaaaaaaaaaaaaaaaaaaaaaaaaaaaaaaaaaaaaaaggaattc

SEQ ID NO: 215963 - DNA, 436 bp, Canis familiaris
atggccctctggatgcgcctcctgcccctgctggccctgctggccctctgggcgcccgcgcccacccgagccttcgttaaccagcacctgtgtggctcccacctggtagaggctctgtacctggtgtgcggggagcgcggcttcttctacacgcctaaggcccgcagggaggtggaggacctgcaggtgagggacgtggagctggccggggcgcctggcgagggcggcctgcagcccctggccctggagggggccctgcagaagcgaggcatcgtggagcagtgctgcaccagcatctgctccctctaccagctggagaattactgcaactaggggcgcggggggcaggacgtggcagcacctgctgcaggtcacggtggccgcaagccttcggctctctgcaccccaagtgattcaataaaccctctgaatgagc

SEQ ID NO: 215964 - DNA, 628 bp, Canis familiaris; identical to SEQ ID NO: 5857
  misc_feature (1)..(1): n is a, c, g, or t

SEQ ID NO: 215965 - DNA, 751 bp, Canis familiaris; identical to SEQ ID NO: 5858
  misc_feature (657)..(657): n is a, c, g, or t
  misc_feature (673)..(673): n is a, c, g, or t

SEQ ID NO: 215966 - DNA, 660 bp, Canis familiaris; identical to SEQ ID NO: 5859

SEQ ID NO: 215967 - DNA, 626 bp, Canis familiaris; identical to SEQ ID NO: 5860

SEQ ID NO: 215968 - DNA, 646 bp, Canis familiaris; identical to SEQ ID NO: 5861

SEQ ID NO: 215969 - DNA, 577 bp, Canis familiaris; identical to SEQ ID NO: 5862

SEQ ID NO: 215970 - DNA, 609 bp, Canis familiaris; identical to SEQ ID NO: 5863

SEQ ID NO: 215971 - DNA, 568 bp, Canis familiaris; identical to SEQ ID NO: 5864

SEQ ID NO: 215972 - DNA, 611 bp, Canis familiaris; identical to SEQ ID NO: 5865

SEQ ID NO: 215973 - DNA, 736 bp, Canis familiaris; identical to SEQ ID NO: 5866

SEQ ID NO: 215974 - DNA, 632 bp, Canis familiaris; identical to SEQ ID NO: 5867

SEQ ID NO: 215975 - DNA, 670 bp, Canis familiaris; identical to SEQ ID NO: 5868

SEQ ID NO: 215976 - DNA, 642 bp, Canis familiaris; identical to SEQ ID NO: 5869

SEQ ID NO: 215977 - DNA, 650 bp, Canis familiaris; identical to SEQ ID NO: 5870

SEQ ID NO: 215978 - DNA, 524 bp, Canis familiaris; identical to SEQ ID NO: 5871

SEQ ID NO: 215979 - DNA, 615 bp, Canis familiaris; identical to SEQ ID NO: 5872

SEQ ID NO: 215980 - DNA, 410 bp, Canis familiaris; identical to SEQ ID NO: 5873

SEQ ID NO: 215981 - DNA, 598 bp, Canis familiaris; identical to SEQ ID NO: 5874

SEQ ID NO: 215982 - DNA, 636 bp, Canis familiaris; identical to SEQ ID NO: 5875

SEQ ID NO: 215983 - DNA, 507 bp, Canis familiaris; identical to SEQ ID NO: 5876

SEQ ID NO: 215984 - DNA, 186 bp, Canis familiaris; identical to SEQ ID NO: 5877

SEQ ID NO: 215985 - DNA, 543 bp, Canis familiaris; identical to SEQ ID NO: 5878
  misc_feature (328)..(328): n is a, c, g, or t

SEQ ID NO: 215986 - DNA, 599 bp, Canis familiaris; identical to SEQ ID NO: 5879

SEQ ID NO: 215987 - DNA, 608 bp, Canis familiaris; identical to SEQ ID NO: 5880

SEQ ID NO: 215988 - DNA, 585 bp, Canis familiaris; identical to SEQ ID NO: 5881
  misc_feature (105)..(105): n is a, c, g, or t

SEQ ID NO: 215989 - DNA, 601 bp, Canis familiaris; identical to SEQ ID NO: 5882

SEQ ID NO: 215990 - DNA, 528 bp, Canis familiaris; identical to SEQ ID NO: 5883
  misc_feature (172)..(172): n is a, c, g, or t
  misc_feature (178)..(178): n is a, c, g, or t
  misc_feature (516)..(516): n is a, c, g, or t

SEQ ID NO: 215991 - DNA, 585 bp, Canis familiaris; identical to SEQ ID NO: 5884
  misc_feature (59)..(59): n is a, c, g, or t

SEQ ID NO: 215992 - DNA, 454 bp, Canis familiaris; identical to SEQ ID NO: 5885
  misc_feature (169)..(169): n is a, c, g, or t
  misc_feature (186)..(186): n is a, c, g, or t

SEQ ID NO: 215993 - DNA, 565 bp, Canis familiaris; identical to SEQ ID NO: 5886

SEQ ID NO: 215994 - DNA, 606 bp, Canis familiaris; identical to SEQ ID NO: 5887

SEQ ID NO: 215995 - DNA, 521 bp, Canis familiaris; identical to SEQ ID NO: 5888

SEQ ID NO: 215996 - DNA, 574 bp, Canis familiaris; identical to SEQ ID NO: 5889

SEQ ID NO: 215997 - DNA, 757 bp, Canis familiaris; identical to SEQ ID NO: 5890
  misc_feature (521)..(521): n is a, c, g, or t

SEQ ID NO: 215998 - DNA, 570 bp, Canis familiaris; identical to SEQ ID NO: 5891

SEQ ID NO: 215999 - DNA, 381 bp, Canis familiaris; identical to SEQ ID NO: 5892

SEQ ID NO: 216000 - DNA, 537 bp, Canis familiaris; identical to SEQ ID NO: 5893

SEQ ID NO: 216001 - DNA, 626 bp, Canis familiaris; identical to SEQ ID NO: 5894

SEQ ID NO: 216002 - DNA, 548 bp, Canis familiaris; identical to SEQ ID NO: 5895

SEQ ID NO: 216003 - DNA, 683 bp, Canis familiaris; identical to SEQ ID NO: 5896
  misc_feature (429)..(429): n is a, c, g, or t

SEQ ID NO: 216004 - DNA, 464 bp, Canis familiaris; identical to SEQ ID NO: 5897

SEQ ID NO: 216005 - DNA, 643 bp, Canis familiaris; identical to SEQ ID NO: 5898

SEQ ID NO: 216006 - DNA, 595 bp, Canis familiaris; identical to SEQ ID NO: 5899

SEQ ID NO: 216007 - DNA, 548 bp, Canis familiaris; identical to SEQ ID NO: 5900

SEQ ID NO: 216008 - DNA, 591 bp, Canis familiaris; identical to SEQ ID NO: 5901

SEQ ID NO: 216009 - DNA, 631 bp, Canis familiaris; identical to SEQ ID NO: 5902

SEQ ID NO: 216010 - DNA, 673 bp, Canis familiaris; identical to SEQ ID NO: 5903
  misc_feature (482)..(482): n is a, c, g, or t

SEQ ID NO: 216011 - DNA, 553 bp, Canis familiaris; identical to SEQ ID NO: 5904

SEQ ID NO: 216012 - DNA, 613 bp, Canis familiaris; identical to SEQ ID NO: 5905

SEQ ID NO: 216013 - DNA, 596 bp, Canis familiaris; identical to SEQ ID NO: 5906

SEQ ID NO: 216014 - DNA, 581 bp, Canis familiaris; identical to SEQ ID NO: 5907

SEQ ID NO: 216015 - DNA, 615 bp, Canis familiaris; identical to SEQ ID NO: 5908

SEQ ID NO: 216016 - DNA, 606 bp, Canis familiaris; identical to SEQ ID NO: 5909

SEQ ID NO: 216017 - DNA, 562 bp, Canis familiaris; identical to SEQ ID NO: 5910

SEQ ID NO: 216018 - DNA, 585 bp, Canis familiaris; identical to SEQ ID NO: 5911

SEQ ID NO: 216019 - DNA, 654 bp, Canis familiaris; identical to SEQ ID NO: 5912

SEQ ID NO: 216020 - DNA, 637 bp, Canis familiaris; identical to SEQ ID NO: 5913

SEQ ID NO: 216021 - DNA, 761 bp, Canis familiaris; identical to SEQ ID NO: 5914

SEQ ID NO: 216022 - DNA, 598 bp, Canis familiaris; identical to SEQ ID NO: 5915

SEQ ID NO: 216023 - DNA, 595 bp, Canis familiaris; identical to SEQ ID NO: 5916

SEQ ID NO: 216024 - DNA, 608 bp, Canis familiaris; identical to SEQ ID NO: 5917
  misc_feature (202)..(202): n is a, c, g, or t

SEQ ID NO: 216025 - DNA, 503 bp, Canis familiaris; identical to SEQ ID NO: 5918

SEQ ID NO: 216026 - DNA, 600 bp, Canis familiaris; identical to SEQ ID NO: 5919

SEQ ID NO: 216027 - DNA, 572 bp, Canis familiaris; identical to SEQ ID NO: 5920

SEQ ID NO: 216028 - DNA, 573 bp, Canis familiaris; identical to SEQ ID NO: 5921

SEQ ID NO: 216029 - DNA, 439 bp, Canis familiaris; identical to SEQ ID NO: 5922

SEQ ID NO: 216030 - DNA, 600 bp, Canis familiaris; identical to SEQ ID NO: 5923
  misc_feature (297)..(297): n is a, c, g, or t

SEQ ID NO: 216031 - DNA, 627 bp, Canis familiaris; identical to SEQ ID NO: 5924

SEQ ID NO: 216032 - DNA, 523 bp, Canis familiaris; identical to SEQ ID NO: 5925

SEQ ID NO: 216033 - DNA, 577 bp, Canis familiaris; identical to SEQ ID NO: 5926

SEQ ID NO: 216034 - DNA, 584 bp, Canis familiaris; identical to SEQ ID NO: 5927

SEQ ID NO: 216035 - DNA, 623 bp, Canis familiaris; identical to SEQ ID NO: 5928

SEQ ID NO: 216036 - DNA, 518 bp, Canis familiaris; identical to SEQ ID NO: 5929

SEQ ID NO: 216037 - DNA, 625 bp, Canis familiaris; identical to SEQ ID NO: 5930

SEQ ID NO: 216038 - DNA, 596 bp, Canis familiaris; identical to SEQ ID NO: 5931

SEQ ID NO: 216039 - DNA, 602 bp, Canis familiaris; identical to SEQ ID NO: 5932

SEQ ID NO: 216040 - DNA, 538 bp, Canis familiaris; identical to SEQ ID NO: 5933
  misc_feature (221)..(221): n is a, c, g, or t

SEQ ID NO: 216041 - DNA, 587 bp, Canis familiaris; identical to SEQ ID NO: 5934
  misc_feature (246)..(246): n is a, c, g, or t

SEQ ID NO: 216042 - DNA, 629 bp, Canis familiaris; identical to SEQ ID NO: 5935

SEQ ID NO: 216043 - DNA, 580 bp, Canis familiaris; identical to SEQ ID NO: 5936

SEQ ID NO: 216044 - DNA, 692 bp, Canis familiaris; identical to SEQ ID NO: 5937

SEQ ID NO: 216045 - DNA, 575 bp, Canis familiaris; identical to SEQ ID NO: 5938

SEQ ID NO: 216046 - DNA, 459 bp, Canis familiaris; identical to SEQ ID NO: 5939

SEQ ID NO: 216047 - DNA, 410 bp, Canis familiaris; identical to SEQ ID NO: 5940

SEQ ID NO: 216048 - DNA, 646 bp, Canis familiaris; identical to SEQ ID NO: 5941

SEQ ID NO: 216049 - DNA, 624 bp, Canis familiaris; identical to SEQ ID NO: 5942

SEQ ID NO: 216050 - DNA, 635 bp, Canis familiaris; identical to SEQ ID NO: 5943
  misc_feature (139)..(139): n is a, c, g, or t

SEQ ID NO: 216051 - DNA, 594 bp, Canis familiaris; identical to SEQ ID NO: 5944

SEQ ID NO: 216052 - DNA, 99 bp, Canis familiaris; identical to SEQ ID NO: 5945

SEQ ID NO: 216053 - DNA, 658 bp, Canis familiaris; identical to SEQ ID NO: 5946

SEQ ID NO: 216054 - DNA, 645 bp, Canis familiaris; identical to SEQ ID NO: 5947

SEQ ID NO: 216055 - DNA, 256 bp, Canis familiaris; identical to SEQ ID NO: 5948

SEQ ID NO: 216056 - DNA, 594 bp, Canis familiaris; identical to SEQ ID NO: 5949

SEQ ID NO: 216057 - DNA, 421 bp, Canis familiaris; identical to SEQ ID NO: 5950

SEQ ID NO: 216058 - DNA, 160 bp, Canis familiaris; identical to SEQ ID NO: 5951

SEQ ID NO: 216059 - DNA, 611 bp, Canis familiaris; identical to SEQ ID NO: 5952

SEQ ID NO: 216060 - DNA, 536 bp, Canis familiaris; identical to SEQ ID NO: 5953

SEQ ID NO: 216061 - DNA, 302 bp, Canis familiaris; identical to SEQ ID NO: 5954

SEQ ID NO: 216062 - DNA, 598 bp, Canis familiaris; identical to SEQ ID NO: 5955

SEQ ID NO: 216063 - DNA, 469 bp, Canis familiaris; identical to SEQ ID NO: 5956

SEQ ID NO: 216064 - DNA, 646 bp, Canis familiaris; identical to SEQ ID NO: 5957

SEQ ID NO: 216065 - DNA, 653 bp, Canis familiaris; identical to SEQ ID NO: 5958

SEQ ID NO: 216066 - DNA, 239 bp, Canis familiaris; identical to SEQ ID NO: 5959

SEQ ID NO: 216067 - DNA, 601 bp, Canis familiaris; identical to SEQ ID NO: 5960
  misc_feature (99)..(99): n is a, c, g, or t

SEQ ID NO: 216068 - DNA, 562 bp, Canis familiaris; identical to SEQ ID NO: 5961

SEQ ID NO: 216069 - DNA, 639 bp, Canis familiaris; identical to SEQ ID NO: 5962

SEQ ID NO: 216070 - DNA, 652 bp, Canis familiaris; identical to SEQ ID NO: 5963

SEQ ID NO: 216071 - DNA, 583 bp, Canis familiaris; identical to SEQ ID NO: 5964

SEQ ID NO: 216072 - DNA, 476 bp, Canis familiaris; identical to SEQ ID NO: 5965
  misc_feature (278)..(278): n is a, c, g, or t

SEQ ID NO: 216073 - DNA, 564 bp, Canis familiaris; identical to SEQ ID NO: 5966

SEQ ID NO: 216074 - DNA, 674 bp, Canis familiaris; identical to SEQ ID NO: 5967

SEQ ID NO: 216075 - DNA, 629 bp, Canis familiaris; identical to SEQ ID NO: 5968

SEQ ID NO: 216076 - DNA, 638 bp, Canis familiaris; identical to SEQ ID NO: 5969

SEQ ID NO: 216077 - DNA, 591 bp, Canis familiaris; identical to SEQ ID NO: 5970

SEQ ID NO: 216078 - DNA, 565 bp, Canis familiaris; identical to SEQ ID NO: 5971

SEQ ID NO: 216079 - DNA, 561 bp, Canis familiaris; identical to SEQ ID NO: 5972

SEQ ID NO: 216080 - DNA, 673 bp, Canis familiaris; identical to SEQ ID NO: 5973

SEQ ID NO: 216081 - DNA, 544 bp, Canis familiaris; identical to SEQ ID NO: 5974

SEQ ID NO: 216082 - DNA, 493 bp, Canis familiaris; identical to SEQ ID NO: 5975

SEQ ID NO: 216083 - DNA, 618 bp, Canis familiaris; identical to SEQ ID NO: 5976

SEQ ID NO: 216084 - DNA, 653 bp, Canis familiaris; identical to SEQ ID NO: 5977

SEQ ID NO: 216085 - DNA, 567 bp, Canis familiaris; identical to SEQ ID NO: 5978
  misc_feature (1)..(1): n is a, c, g, or t

SEQ ID NO: 216086 - DNA, 607 bp, Canis familiaris; identical to SEQ ID NO: 5979

SEQ ID NO: 216087 - DNA, 582 bp, Canis familiaris; identical to SEQ ID NO: 5980

SEQ ID NO: 216088 - DNA, 674 bp, Canis familiaris; identical to SEQ ID NO: 5981
  misc_feature (373)..(374): n is a, c, g, or t

SEQ ID NO: 216089 - DNA, 681 bp, Canis familiaris; identical to SEQ ID NO: 5982
  misc_feature (166)..(166): n is a, c, g, or t
  misc_feature (229)..(229): n is a, c, g, or t

SEQ ID NO: 216090 - DNA, 593 bp, Canis familiaris; identical to SEQ ID NO: 5983

SEQ ID NO: 216091 - DNA, 660 bp, Canis familiaris; identical to SEQ ID NO: 5984
  misc_feature (38)..(38): n is a, c, g, or t

SEQ ID NO: 216092 - DNA, 639 bp, Canis familiaris; identical to SEQ ID NO: 5985
  misc_feature (13)..(13): n is a, c, g, or t

SEQ ID NO: 216093 - DNA, 574 bp, Canis familiaris; identical to SEQ ID NO: 5986

SEQ ID NO: 216094 - DNA, 668 bp, Canis familiaris; identical to SEQ ID NO: 5987
  misc_feature (231)..(231): n is a, c, g, or t

SEQ ID NO: 216095 - DNA, 639 bp, Canis familiaris; identical to SEQ ID NO: 5988

SEQ ID NO: 216096 - DNA, 525 bp, Canis familiaris; identical to SEQ ID NO: 5989

SEQ ID NO: 216097 - DNA, 627 bp, Canis familiaris; identical to SEQ ID NO: 5990

SEQ ID NO: 216098 - DNA, 615 bp, Canis familiaris; identical to SEQ ID NO: 5991
  misc_feature (122)..(122): n is a, c, g, or t

SEQ ID NO: 216099 - DNA, 624 bp, Canis familiaris; identical to SEQ ID NO: 5992

SEQ ID NO: 216100 - DNA, 597 bp, Canis familiaris; identical to SEQ ID NO: 5993

SEQ ID NO: 216101 - DNA, 511 bp, Canis familiaris; identical to SEQ ID NO: 5994

SEQ ID NO: 216102 - DNA, 493 bp, Canis familiaris; identical to SEQ ID NO: 5995

SEQ ID NO: 216103 - DNA, 513 bp, Canis familiaris; identical to SEQ ID NO: 5996

SEQ ID NO: 216104 - DNA, 692 bp, Canis familiaris; identical to SEQ ID NO: 5997

SEQ ID NO: 216105 - DNA, 582 bp, Canis familiaris; identical to SEQ ID NO: 5998

SEQ ID NO: 216106 - DNA, 503 bp, Canis familiaris; identical to SEQ ID NO: 5999

SEQ ID NO: 216107 - DNA, 670 bp, Canis familiaris; identical to SEQ ID NO: 6000
  misc_feature (13)..(13): n is a, c, g, or t

SEQ ID NO: 216108 - DNA, 602 bp, Canis familiaris; identical to SEQ ID NO: 6001

SEQ ID NO: 216109 - DNA, 606 bp, Canis familiaris; identical to SEQ ID NO: 6002
  misc_feature (463)..(463): n is a, c, g, or t

SEQ ID NO: 216110 - DNA, 455 bp, Canis familiaris; identical to SEQ ID NO: 6003

SEQ ID NO: 216111 - DNA, 516 bp, Canis familiaris; identical to SEQ ID NO: 6004

SEQ ID NO: 216112 - DNA, 603 bp, Canis familiaris; identical to SEQ ID NO: 6005

SEQ ID NO: 216113 - DNA, 566 bp, Canis familiaris; identical to SEQ ID NO: 6006

SEQ ID NO: 216114 - DNA, 579 bp, Canis familiaris; identical to SEQ ID NO: 6007

SEQ ID NO: 216115 - DNA, 588 bp, Canis familiaris; identical to SEQ ID NO: 6008

SEQ ID NO: 216116 - DNA, 622 bp, Canis familiaris; identical to SEQ ID NO: 6009
  misc_feature (89)..(89): n is a, c, g, or t

SEQ ID NO: 216117 - DNA, 665 bp, Canis familiaris; identical to SEQ ID NO: 6010

SEQ ID NO: 216118 - DNA, 506 bp, Canis familiaris; identical to SEQ ID NO: 6011

SEQ ID NO: 216119 - DNA, 578 bp, Canis familiaris; identical to SEQ ID NO: 6012

SEQ ID NO: 216120 - DNA, 520 bp, Canis familiaris; identical to SEQ ID NO: 6013

SEQ ID NO: 216121 - DNA, 618 bp, Canis familiaris; identical to SEQ ID NO: 6014

SEQ ID NO: 216122 - DNA, 537 bp, Canis familiaris; identical to SEQ ID NO: 6015

SEQ ID NO: 216123 - DNA, 588 bp, Canis familiaris; identical to SEQ ID NO: 6016

SEQ ID NO: 216124 - DNA, 665 bp, Canis familiaris; identical to SEQ ID NO: 6017

SEQ ID NO: 216125 - DNA, 628 bp, Canis familiaris; identical to SEQ ID NO: 6018

SEQ ID NO: 216126 - DNA, 607 bp, Canis familiaris; identical to SEQ ID NO: 6019

SEQ ID NO: 216127 - DNA, 606 bp, Canis familiaris; identical to SEQ ID NO: 6020

SEQ ID NO: 216128 - DNA, 629 bp, Canis familiaris; identical to SEQ ID NO: 6021

SEQ ID NO: 216129 - DNA, 558 bp, Canis familiaris; identical to SEQ ID NO: 6022

SEQ ID NO: 216130 - DNA, 581 bp, Canis familiaris; identical to SEQ ID NO: 6023

SEQ ID NO: 216131 - DNA, 657 bp, Canis familiaris; identical to SEQ ID NO: 6024

SEQ ID NO: 216132 - DNA, 630 bp, Canis familiaris; identical to SEQ ID NO: 6025

SEQ ID NO: 216133 - DNA, 611 bp, Canis familiaris; identical to SEQ ID NO: 6026

SEQ ID NO: 216134 - DNA, 649 bp, Canis familiaris; identical to SEQ ID NO: 6027

SEQ ID NO: 216135 - DNA, 623 bp, Canis familiaris; identical to SEQ ID NO: 6028

SEQ ID NO: 216136 - DNA, 612 bp, Canis familiaris; identical to SEQ ID NO: 6029

SEQ ID NO: 216137 - DNA, 615 bp, Canis familiaris; identical to SEQ ID NO: 6030
  misc_feature (368)..(368): n is a, c, g, or t

SEQ ID NO: 216138 - DNA, 581 bp, Canis familiaris; identical to SEQ ID NO: 6031

SEQ ID NO: 216139 - DNA, 630 bp, Canis familiaris; identical to SEQ ID NO: 6032

SEQ ID NO: 216140 - DNA, 567 bp, Canis familiaris; identical to SEQ ID NO: 6033

SEQ ID NO: 216141 - DNA, 651 bp, Canis familiaris; identical to SEQ ID NO: 6034
  misc_feature (363)..(363): n is a, c, g, or t

SEQ ID NO: 216142 - DNA, 580 bp, Canis familiaris; identical to SEQ ID NO: 6035

SEQ ID NO: 216143 - DNA, 469 bp, Canis familiaris; identical to SEQ ID NO: 6036

SEQ ID NO: 216144 - DNA, 606 bp, Canis familiaris; identical to SEQ ID NO: 6037

SEQ ID NO: 216145 - DNA, 602 bp, Canis familiaris; identical to SEQ ID NO: 6038

SEQ ID NO: 216146 - DNA, 551 bp, Canis familiaris; identical to SEQ ID NO: 6039

SEQ ID NO: 216147 - DNA, 219 bp, Canis familiaris; identical to SEQ ID NO: 6040

SEQ ID NO: 216148 - DNA, 517 bp, Canis familiaris; identical to SEQ ID NO: 6041

SEQ ID NO: 216149 - DNA, 605 bp, Canis familiaris; identical to SEQ ID NO: 6042

SEQ ID NO: 216150 - DNA, 599 bp, Canis familiaris; identical to SEQ ID NO: 6043

SEQ ID NO: 216151 - DNA, 564 bp, Canis familiaris; identical to SEQ ID NO: 6044

SEQ ID NO: 216152 - DNA, 570 bp, Canis familiaris; identical to SEQ ID NO: 6045

SEQ ID NO: 216153 - DNA, 414 bp, Canis familiaris; identical to SEQ ID NO: 6046

SEQ ID NO: 216154 - DNA, 629 bp, Canis familiaris; identical to SEQ ID NO: 6047
  misc_feature (222)..(222): n is a, c, g, or t

SEQ ID NO: 216155 - DNA, 454 bp, Canis familiaris; identical to SEQ ID NO: 6048

SEQ ID NO: 216156 - DNA, 398 bp, Canis familiaris; identical to SEQ ID NO: 6049

SEQ ID NO: 216157 - DNA, 102 bp, Canis familiaris; identical to SEQ ID NO: 6050

SEQ ID NO: 216158 - DNA, 475 bp, Canis familiaris; identical to SEQ ID NO: 6051
  misc_feature (226)..(226): n is a, c, g, or t

SEQ ID NO: 216159 - DNA, 405 bp, Canis familiaris; identical to SEQ ID NO: 6052
  misc_feature (61)..(61): n is a, c, g, or t

SEQ ID NO: 216160 - DNA, 578 bp, Canis familiaris; identical to SEQ ID NO: 6053

SEQ ID NO: 216161 - DNA, 624 bp, Canis familiaris; identical to SEQ ID NO: 6054

SEQ ID NO: 216162 - DNA, 587 bp, Canis familiaris; identical to SEQ ID NO: 6055
  misc_feature (47)..(47): n is a, c, g, or t

SEQ ID NO: 216163 - DNA, 250 bp, Canis familiaris; identical to SEQ ID NO: 6056

SEQ ID NO: 216164 - DNA, 662 bp, Canis familiaris; identical to SEQ ID NO: 6057

SEQ ID NO: 216165 - DNA, 558 bp, Canis familiaris; identical to SEQ ID NO: 6058
  misc_feature (32)..(32): n is a, c, g, or t
  misc_feature (168)..(169): n is a, c, g, or t
  misc_feature (241)..(241): n is a, c, g, or t
  misc_feature (271)..(272): n is a, c, g, or t

SEQ ID NO: 216166 - DNA, 646 bp, Canis familiaris; identical to SEQ ID NO: 6059

SEQ ID NO: 216167 - DNA, 562 bp, Canis familiaris; identical to SEQ ID NO: 6060

SEQ ID NO: 216168 - DNA, 612 bp, Canis familiaris; identical to SEQ ID NO: 6061

SEQ ID NO: 216169 - DNA, 582 bp, Canis familiaris; identical to SEQ ID NO: 6062

SEQ ID NO: 216170 - DNA, 572 bp, Canis familiaris; identical to SEQ ID NO: 6063

SEQ ID NO: 216171 - DNA, 494 bp, Canis familiaris; identical to SEQ ID NO: 6064

SEQ ID NO: 216172 - DNA, 631 bp, Canis familiaris; identical to SEQ ID NO: 6065

SEQ ID NO: 216173 - DNA, 165 bp, Canis familiaris; identical to SEQ ID NO: 6066

SEQ ID NO: 216174 - DNA, 510 bp, Canis familiaris; identical to SEQ ID NO: 6067

SEQ ID NO: 216175 - DNA, 628 bp, Canis familiaris; identical to SEQ ID NO: 6068

SEQ ID NO: 216176 - DNA, 659 bp, Canis familiaris; identical to SEQ ID NO: 6069

SEQ ID NO: 216177 - DNA, 627 bp, Canis familiaris; identical to SEQ ID NO: 6070

SEQ ID NO: 216178 - DNA, 628 bp, Canis familiaris; identical to SEQ ID NO: 6071

SEQ ID NO: 216179 - DNA, 336 bp, Canis familiaris; identical to SEQ ID NO: 6072

SEQ ID NO: 216180 - DNA, 612 bp, Canis familiaris; identical to SEQ ID NO: 6073

SEQ ID NO: 216181 - DNA, 600 bp, Canis familiaris; identical to SEQ ID NO: 6074

SEQ ID NO: 216182 - DNA, 155 bp, Canis familiaris; identical to SEQ ID NO: 6075

SEQ ID NO: 216183 - DNA, 479 bp, Canis familiaris; identical to SEQ ID NO: 6076
  misc_feature (11)..(11): n is a, c, g, or t

SEQ ID NO: 216184 - DNA, 501 bp, Canis familiaris; identical to SEQ ID NO: 6077

SEQ ID NO: 216185 - DNA, 600 bp, Canis familiaris; identical to SEQ ID NO: 6078

SEQ ID NO: 216186 - DNA, 586 bp, Canis familiaris; identical to SEQ ID NO: 6079

SEQ ID NO: 216187 - DNA, 670 bp, Canis familiaris; identical to SEQ ID NO: 6080

SEQ ID NO: 216188 - DNA, 624 bp, Canis familiaris; identical to SEQ ID NO: 6081

SEQ ID NO: 216189 - DNA, 602 bp, Canis familiaris; identical to SEQ ID NO: 6082

SEQ ID NO: 216190 - DNA, 581 bp, Canis familiaris; identical to SEQ ID NO: 6083

SEQ ID NO: 216191 - DNA, 614 bp, Canis familiaris; identical to SEQ ID NO: 6084

SEQ ID NO: 216192 - DNA, 584 bp, Canis familiaris; identical to SEQ ID NO: 6085

SEQ ID NO: 216193 - DNA, 648 bp, Canis familiaris; identical to SEQ ID NO: 6086
  misc_feature (162)..(162): n is a, c, g, or t

SEQ ID NO: 216194 - DNA, 748 bp, Canis familiaris; identical to SEQ ID NO: 6087
  misc_feature (12)..(12): n is a, c, g, or t
  misc_feature (336)..(336): n is a, c, g, or t
  misc_feature (482)..(482): n is a, c, g, or t

SEQ ID NO: 216195 - DNA, 587 bp, Canis familiaris; identical to SEQ ID NO: 6088

SEQ ID NO: 216196 - DNA, 680 bp, Canis familiaris; identical to SEQ ID NO: 6089
  misc_feature (1)..(1): n is a, c, g, or t
  misc_feature (62)..(62): n is a, c, g, or t

SEQ ID NO: 216197 - DNA, 648 bp, Canis familiaris; identical to SEQ ID NO: 6090

SEQ ID NO: 216198 - DNA, 592 bp, Canis familiaris; identical to SEQ ID NO: 6091
  misc_feature (319)..(319): n is a, c, g, or t

SEQ ID NO: 216199 - DNA, 628 bp, Canis familiaris; identical to SEQ ID NO: 6092

SEQ ID NO: 216200 - DNA, 351 bp, Canis familiaris; identical to SEQ ID NO: 6093

SEQ ID NO: 216201 - DNA, 655 bp, Canis familiaris; identical to SEQ ID NO: 6094

SEQ ID NO: 216202 - DNA, 609 bp, Canis familiaris; identical to SEQ ID NO: 6095

SEQ ID NO: 216203 - DNA, 546 bp, Canis familiaris; identical to SEQ ID NO: 6096

SEQ ID NO: 216204 - DNA, 658 bp, Canis familiaris; identical to SEQ ID NO: 6097

SEQ ID NO: 216205 - DNA, 401 bp, Canis familiaris; identical to SEQ ID NO: 6098

SEQ ID NO: 216206 - DNA, 353 bp, Canis familiaris; identical to SEQ ID NO: 6099

SEQ ID NO: 216207 - DNA, 543 bp, Canis familiaris; identical to SEQ ID NO: 6100

SEQ ID NO: 216208 - DNA, 534 bp, Canis familiaris; identical to SEQ ID NO: 6101

SEQ ID NO: 216209 - DNA, 581 bp, Canis familiaris; identical to SEQ ID NO: 6102

SEQ ID NO: 216210 - DNA, 610 bp, Canis familiaris; identical to SEQ ID NO: 6103

SEQ ID NO: 216211 - DNA, 629 bp, Canis familiaris; identical to SEQ ID NO: 6104

SEQ ID NO: 216212 - DNA, 561 bp, Canis familiaris; identical to SEQ ID NO: 6105
  misc_feature (288)..(288): n is a, c, g, or t

SEQ ID NO: 216213 - DNA, 609 bp, Canis familiaris; identical to SEQ ID NO: 6106

SEQ ID NO: 216214 - DNA, 570 bp, Canis familiaris; identical to SEQ ID NO: 6107

SEQ ID NO: 216215 - DNA, 673 bp, Canis familiaris; identical to SEQ ID NO: 6108

SEQ ID NO: 216216 - DNA, 567 bp, Canis familiaris; identical to SEQ ID NO: 6109

SEQ ID NO: 216217 - DNA, 618 bp, Canis familiaris; identical to SEQ ID NO: 6110

SEQ ID NO: 216218 - DNA, 594 bp, Canis familiaris; identical to SEQ ID NO: 6111

SEQ ID NO: 216219 - DNA, 642 bp, Canis familiaris; identical to SEQ ID NO: 6112

SEQ ID NO: 216220 - DNA, 524 bp, Canis familiaris; identical to SEQ ID NO: 6113

SEQ ID NO: 216221 - DNA, 590 bp, Canis familiaris; identical to SEQ ID NO: 6114

SEQ ID NO: 216222 - DNA, 626 bp, Canis familiaris; identical to SEQ ID NO: 6115

SEQ ID NO: 216223 - DNA, 586 bp, Canis familiaris; identical to SEQ ID NO: 6116
  misc_feature (185)..(185): n is a, c, g, or t

SEQ ID NO: 216224 - DNA, 602 bp, Canis familiaris; identical to SEQ ID NO: 6117

SEQ ID NO: 216225 - DNA, 557 bp, Canis familiaris; identical to SEQ ID NO: 6118

SEQ ID NO: 216226 - DNA, 577 bp, Canis familiaris; identical to SEQ ID NO: 6119

SEQ ID NO: 216227 - DNA, 638 bp, Canis familiaris; identical to SEQ ID NO: 6120

SEQ ID NO: 216228 - DNA, 595 bp, Canis familiaris; identical to SEQ ID NO: 6121

SEQ ID NO: 216229 - DNA, 496 bp, Canis familiaris; identical to SEQ ID NO: 6122

SEQ ID NO: 216230 - DNA, 611 bp, Canis familiaris; identical to SEQ ID NO: 6123

SEQ ID NO: 216231 - DNA, 593 bp, Canis familiaris; identical to SEQ ID NO: 6124

SEQ ID NO: 216232 - DNA, 550 bp, Canis familiaris; identical to SEQ ID NO: 6125

SEQ ID NO: 216233 - DNA, 565 bp, Canis familiaris; identical to SEQ ID NO: 6126
  misc_feature (389)..(389): n is a, c, g, or t

SEQ ID NO: 216234 - DNA, 665 bp, Canis familiaris; identical to SEQ ID NO: 6127
  misc_feature (551)..(551): n is a, c, g, or t

SEQ ID NO: 216235 - DNA, 601 bp, Canis familiaris; identical to SEQ ID NO: 6128

SEQ ID NO: 216236 - DNA, 656 bp, Canis familiaris; identical to SEQ ID NO: 6129
  misc_feature (354)..(354): n is a, c, g, or t

SEQ ID NO: 216237 - DNA, 701 bp, Canis familiaris; identical to SEQ ID NO: 6130

SEQ ID NO: 216238 - DNA, 131 bp, Canis familiaris; identical to SEQ ID NO: 6131

SEQ ID NO: 216239 - DNA, 600 bp, Canis familiaris; identical to SEQ ID NO: 6132

SEQ ID NO: 216240 - DNA, 522 bp, Canis familiaris; identical to SEQ ID NO: 6133
  misc_feature (83)..(83): n is a, c, g, or t

SEQ ID NO: 216241 - DNA, 669 bp, Canis familiaris; identical to SEQ ID NO: 6134
  misc_feature (501)..(501): n is a, c, g, or t

SEQ ID NO: 216242 - DNA, 621 bp, Canis familiaris; identical to SEQ ID NO: 6135

SEQ ID NO: 216243 - DNA, 591 bp, Canis familiaris; identical to SEQ ID NO: 6136

SEQ ID NO: 216244 - DNA, 586 bp, Canis familiaris; identical to SEQ ID NO: 6137

SEQ ID NO: 216245 - DNA, 626 bp, Canis familiaris; identical to SEQ ID NO: 6138
  misc_feature (1)..(1): n is a, c, g, or t

SEQ ID NO: 216246 - DNA, 617 bp, Canis familiaris; identical to SEQ ID NO: 6139
  misc_feature (1)..(1): n is a, c, g, or t

SEQ ID NO: 216247 - DNA, 619 bp, Canis familiaris; identical to SEQ ID NO: 6140

SEQ ID NO: 216248 - DNA, 586 bp, Canis familiaris; identical to SEQ ID NO: 6141

SEQ ID NO: 216249 - DNA, 607 bp, Canis familiaris; identical to SEQ ID NO: 6142

SEQ ID NO: 216250 - DNA, 563 bp, Canis familiaris; identical to SEQ ID NO: 6143

SEQ ID NO: 216251 - DNA, 559 bp, Canis familiaris; identical to SEQ ID NO: 6144

SEQ ID NO: 216252 - DNA, 569 bp, Canis familiaris; identical to SEQ ID NO: 6145

SEQ ID NO: 216253 - DNA, 589 bp, Canis familiaris; identical to SEQ ID NO: 6146

SEQ ID NO: 216254 - DNA, 635 bp, Canis familiaris; identical to SEQ ID NO: 6147
  misc_feature (486)..(487): n is a, c, g, or t

SEQ ID NO: 216255 - DNA, 483 bp, Canis familiaris; identical to SEQ ID NO: 6148

SEQ ID NO: 216256 - DNA, 622 bp, Canis familiaris; identical to SEQ ID NO: 6149
  misc_feature (18)..(18): n is a, c, g, or t

SEQ ID NO: 216257 - DNA, 606 bp, Canis familiaris; identical to SEQ ID NO: 6150

SEQ ID NO: 216258 - DNA, 674 bp, Canis familiaris; identical to SEQ ID NO: 6151
  misc_feature (1)..(1): n is a, c, g, or t
  misc_feature (61)..(61): n is a, c, g, or t

SEQ ID NO: 216259 - DNA, 681 bp, Canis familiaris; identical to SEQ ID NO: 6152
  misc_feature (529)..(529): n is a, c, g, or t
  misc_feature (571)..(571): n is a, c, g, or t

SEQ ID NO: 216260 - DNA, 610 bp, Canis familiaris; identical to SEQ ID NO: 6153

SEQ ID NO: 216261 - DNA, 603 bp, Canis familiaris; identical to SEQ ID NO: 6154

SEQ ID NO: 216262 - DNA, 677 bp, Canis familiaris; identical to SEQ ID NO: 6155
  misc_feature (160)..(160): n is a, c, g, or t
  misc_feature (409)..(409): n is a, c, g, or t
  misc_feature (416)..(416): n is a, c, g, or t
  misc_feature (447)..(447): n is a, c, g, or t

SEQ ID NO: 216263 - DNA, 568 bp, Canis familiaris; identical to SEQ ID NO: 6156

SEQ ID NO: 216264 - DNA, 495 bp, Canis familiaris; identical to SEQ ID NO: 6157

SEQ ID NO: 216265 - DNA, 592 bp, Canis familiaris; identical to SEQ ID NO: 6158

SEQ ID NO: 216266 - DNA, 628 bp, Canis familiaris; identical to SEQ ID NO: 6159

SEQ ID NO: 216267 - DNA, 650 bp, Canis familiaris; identical to SEQ ID NO: 6160
  misc_feature (494)..(494): n is a, c, g, or t

SEQ ID NO: 216268 - DNA, 675 bp, Canis familiaris; identical to SEQ ID NO: 6161
  misc_feature (93)..(93): n is a, c, g, or t

SEQ ID NO: 216269 - DNA, 631 bp, Canis familiaris; identical to SEQ ID NO: 6162

SEQ ID NO: 216270 - DNA, 611 bp, Canis familiaris; identical to SEQ ID NO: 6163

SEQ ID NO: 216271 - DNA, 665 bp, Canis familiaris; identical to SEQ ID NO: 6164

SEQ ID NO: 216272 - DNA, 586 bp, Canis familiaris; identical to SEQ ID NO: 6165

SEQ ID NO: 216273 - DNA, 554 bp, Canis familiaris; identical to SEQ ID NO: 6166

SEQ ID NO: 216274 - DNA, 624 bp, Canis familiaris; identical to SEQ ID NO: 6167

SEQ ID NO: 216275 - DNA, 580 bp, Canis familiaris; identical to SEQ ID NO: 6168

SEQ ID NO: 216276 - DNA, 554 bp, Canis familiaris; identical to SEQ ID NO: 6169

SEQ ID NO: 216277 - DNA, 537 bp, Canis familiaris; identical to SEQ ID NO: 6170

SEQ ID NO: 216278 - DNA, 565 bp, Canis familiaris; identical to SEQ ID NO: 6171

SEQ ID NO: 216279 - DNA, 561 bp, Canis familiaris; identical to SEQ ID NO: 6172

SEQ ID NO: 216280 - DNA, 459 bp, Canis familiaris; identical to SEQ ID NO: 6173

SEQ ID NO: 216281 - DNA, 718 bp, Canis familiaris; identical to SEQ ID NO: 6174

SEQ ID NO: 216282 - DNA, 655 bp, Canis familiaris; identical to SEQ ID NO: 6175
  misc_feature (288)..(288): n is a, c, g, or t
  misc_feature (337)..(337): n is a, c, g, or t

SEQ ID NO: 216283 - DNA, 591 bp, Canis familiaris; identical to SEQ ID NO: 6176

SEQ ID NO: 216284 - DNA, 558 bp, Canis familiaris; identical to SEQ ID NO: 6177
  misc_feature (319)..(319): n is a, c, g, or t
  misc_feature (384)..(384): n is a, c, g, or t

SEQ ID NO: 216285 - DNA, 607 bp, Canis familiaris; identical to SEQ ID NO: 6178

SEQ ID NO: 216286 - DNA, 632 bp, Canis familiaris; identical to SEQ ID NO: 6179

SEQ ID NO: 216287 - DNA, 514 bp, Canis familiaris; identical to SEQ ID NO: 6180
  misc_feature (71)..(71): n is a, c, g, or t
  misc_feature (130)..(130): n is a, c, g, or t
  misc_feature (137)..(137): n is a, c, g, or t
  misc_feature (149)..(149): n is a, c, g, or t

SEQ ID NO: 216288 - DNA, 683 bp, Canis familiaris; identical to SEQ ID NO: 6181
  misc_feature (60)..(60): n is a, c, g, or t

SEQ ID NO: 216289 - DNA, 649 bp, Canis familiaris; identical to SEQ ID NO: 6182
  misc_feature (337)..(337): n is a, c, g, or t

SEQ ID NO: 216290 - DNA, 588 bp, Canis familiaris; identical to SEQ ID NO: 6183
  misc_feature (506)..(506): n is a, c, g, or t

SEQ ID NO: 216291 - DNA, 658 bp, Canis familiaris; identical to SEQ ID NO: 6184

SEQ ID NO: 216292 - DNA, 548 bp, Canis familiaris; identical to SEQ ID NO: 6185

SEQ ID NO: 216293 - DNA, 643 bp, Canis familiaris; identical to SEQ ID NO: 6186

SEQ ID NO: 216294 - DNA, 650 bp, Canis familiaris; identical to SEQ ID NO: 6187

SEQ ID NO: 216295 - DNA, 643 bp, Canis familiaris; identical to SEQ ID NO: 6188

SEQ ID NO: 216296 - DNA, 466 bp, Canis familiaris; identical to SEQ ID NO: 6189

SEQ ID NO: 216297 - DNA, 634 bp, Canis familiaris; identical to SEQ ID NO: 6190

SEQ ID NO: 216298 - DNA, 594 bp, Canis familiaris; identical to SEQ ID NO: 6191

SEQ ID NO: 216299 - DNA, 608 bp, Canis familiaris; identical to SEQ ID NO: 6192

SEQ ID NO: 216300 - DNA, 604 bp, Canis familiaris; identical to SEQ ID NO: 6193

SEQ ID NO: 216301 - DNA, 599 bp, Canis familiaris; identical to SEQ ID NO: 6194

SEQ ID NO: 216302 - DNA, 613 bp, Canis familiaris; identical to SEQ ID NO: 6195

SEQ ID NO: 216303 - DNA, 575 bp, Canis familiaris; identical to SEQ ID NO: 6196

SEQ ID NO: 216304 - DNA, 138 bp, Canis familiaris; identical to SEQ ID NO: 6197

SEQ ID NO: 216305 - DNA, 638 bp, Canis familiaris; identical to SEQ ID NO: 6198

SEQ ID NO: 216306 - DNA, 685 bp, Canis familiaris; identical to SEQ ID NO: 6199

SEQ ID NO: 216307 - DNA, 563 bp, Canis familiaris; identical to SEQ ID NO: 6200

SEQ ID NO: 216308 - DNA, 657 bp, Canis familiaris; identical to SEQ ID NO: 6201

SEQ ID NO: 216309 - DNA, 629 bp, Canis familiaris; identical to SEQ ID NO: 6202

SEQ ID NO: 216310 - DNA, 633 bp, Canis familiaris; identical to SEQ ID NO: 6203

SEQ ID NO: 216311 - DNA, 611 bp, Canis familiaris; identical to SEQ ID NO: 6204
  misc_feature (328)..(328): n is a, c, g, or t
  misc_feature (529)..(529): n is a, c, g, or t
  misc_feature (536)..(536): n is a, c, g, or t
  misc_feature (542)..(542): n is a, c, g, or t

SEQ ID NO: 216312 - DNA, 603 bp, Canis familiaris; identical to SEQ ID NO: 6205

SEQ ID NO: 216313 - DNA, 637 bp, Canis familiaris; identical to SEQ ID NO: 6206

SEQ ID NO: 216314 - DNA, 667 bp, Canis familiaris; identical to SEQ ID NO: 6207
  misc_feature (255)..(255): n is a, c, g, or t

SEQ ID NO: 216315 - DNA, 619 bp, Canis familiaris; identical to SEQ ID NO: 6208

SEQ ID NO: 216316 - DNA, 530 bp, Canis familiaris; identical to SEQ ID NO: 6209

SEQ ID NO: 216317 - DNA, 679 bp, Canis familiaris; identical to SEQ ID NO: 6210

SEQ ID NO: 216318 - DNA, 679 bp, Canis familiaris; identical to SEQ ID NO: 6211

SEQ ID NO: 216319 - DNA, 633 bp, Canis familiaris; identical to SEQ ID NO: 6212

SEQ ID NO: 216320 - DNA, 636 bp, Canis familiaris; identical to SEQ ID NO: 6213

SEQ ID NO: 216321 - DNA, 640 bp, Canis familiaris; identical to SEQ ID NO: 6214
  misc_feature (59)..(59): n is a, c, g, or t

SEQ ID NO: 216322 - DNA, 651 bp, Canis familiaris; identical to SEQ ID NO: 6215

SEQ ID NO: 216323 - DNA, 674 bp, Canis familiaris; identical to SEQ ID NO: 6216

SEQ ID NO: 216324 - DNA, 111 bp, Canis familiaris; identical to SEQ ID NO: 6217

SEQ ID NO: 216325 - DNA, 521 bp, Canis familiaris; identical to SEQ ID NO: 6218

SEQ ID NO: 216326 - DNA, 611 bp, Canis familiaris; identical to SEQ ID NO: 6219

SEQ ID NO: 216327 - DNA, 508 bp, Canis familiaris; identical to SEQ ID NO: 6220

SEQ ID NO: 216328 - DNA, 603 bp, Canis familiaris; identical to SEQ ID NO: 6221

SEQ ID NO: 216329 - DNA, 491 bp, Canis familiaris; identical to SEQ ID NO: 6222

SEQ ID NO: 216330 - DNA, 565 bp, Canis familiaris; identical to SEQ ID NO: 6223

SEQ ID NO: 216331 - DNA, 620 bp, Canis familiaris; identical to SEQ ID NO: 6224

SEQ ID NO: 216332 - DNA, 381 bp, Canis familiaris; identical to SEQ ID NO: 6225

SEQ ID NO: 216333 - DNA, 527 bp, Canis familiaris; identical to SEQ ID NO: 6226

SEQ ID NO: 216334 - DNA, 593 bp, Canis familiaris; identical to SEQ ID NO: 6227
  misc_feature (126)..(126): n is a, c, g, or t

SEQ ID NO: 216335 - DNA, 300 bp, Canis familiaris; identical to SEQ ID NO: 6228

SEQ ID NO: 216336 - DNA, 367 bp, Canis familiaris; identical to SEQ ID NO: 6229

SEQ ID NO: 216337 - DNA, 683 bp, Canis familiaris; identical to SEQ ID NO: 6230

SEQ ID NO: 216338 - DNA, 646 bp, Canis familiaris; identical to SEQ ID NO: 6231

SEQ ID NO: 216339 - DNA, 595 bp, Canis familiaris; identical to SEQ ID NO: 6232

SEQ ID NO: 216340 - DNA, 573 bp, Canis familiaris; identical to SEQ ID NO: 6233

SEQ ID NO: 216341 - DNA, 611 bp, Canis familiaris; identical to SEQ ID NO: 6234

SEQ ID NO: 216342 - DNA, 101 bp, Canis familiaris; identical to SEQ ID NO: 6235

SEQ ID NO: 216343 - DNA, 474 bp, Canis familiaris; identical to SEQ ID NO: 6236

SEQ ID NO: 216344 - DNA, 652 bp, Canis familiaris; identical to SEQ ID NO: 6237

SEQ ID NO: 216345 - DNA, 579 bp, Canis familiaris; identical to SEQ ID NO: 6238

SEQ ID NO: 216346 - DNA, 526 bp, Canis familiaris; identical to SEQ ID NO: 6239

SEQ ID NO: 216347 - DNA, 623 bp, Canis familiaris; identical to SEQ ID NO: 6240
  misc_feature (187)..(187): n is a, c, g, or t

SEQ ID NO: 216348 - DNA, 667 bp, Canis familiaris; identical to SEQ ID NO: 6241

SEQ ID NO: 216349 - DNA, 609 bp, Canis familiaris; identical to SEQ ID NO: 6242

SEQ ID NO: 216350 - DNA, 646 bp, Canis familiaris; identical to SEQ ID NO: 6243

SEQ ID NO: 216351 - DNA, 526 bp, Canis familiaris; identical to SEQ ID NO: 6244

SEQ ID NO: 216352 - DNA, 639 bp, Canis familiaris; identical to SEQ ID NO: 6245

SEQ ID NO: 216353 - DNA, 614 bp, Canis familiaris; identical to SEQ ID NO: 6246

SEQ ID NO: 216354 - DNA, 497 bp, Canis familiaris; identical to SEQ ID NO: 6247

SEQ ID NO: 216355 - DNA, 655 bp, Canis familiaris; identical to SEQ ID NO: 6248

SEQ ID NO: 216356 - DNA, 195 bp, Canis familiaris; identical to SEQ ID NO: 6249

SEQ ID NO: 216357 - DNA, 581 bp, Canis familiaris; identical to SEQ ID NO: 6250

SEQ ID NO: 216358 - DNA, 604 bp, Canis familiaris; identical to SEQ ID NO: 6251

SEQ ID NO: 216359 - DNA, 644 bp, Canis familiaris; identical to SEQ ID NO: 6252

SEQ ID NO: 216360 - DNA, 609 bp, Canis familiaris; identical to SEQ ID NO: 6253

SEQ ID NO: 216361 - DNA, 559 bp, Canis familiaris; identical to SEQ ID NO: 6254

SEQ ID NO: 216362 - DNA, 639 bp, Canis familiaris; identical to SEQ ID NO: 6255

SEQ ID NO: 216363 - DNA, 382 bp, Canis familiaris; identical to SEQ ID NO: 6256

SEQ ID NO: 216364 - DNA, 606 bp, Canis familiaris; identical to SEQ ID NO: 6257

SEQ ID NO: 216365 - DNA, 334 bp, Canis familiaris; identical to SEQ ID NO: 6258

SEQ ID NO: 216366 - DNA, 608 bp, Canis familiaris; identical to SEQ ID NO: 6259
  misc_feature (85)..(85): n is a, c, g, or t

SEQ ID NO: 216367 - DNA, 501 bp, Canis familiaris; identical to SEQ ID NO: 6260
  misc_feature (218)..(218): n is a, c, g, or t

SEQ ID NO: 216368 - DNA, 537 bp, Canis familiaris; identical to SEQ ID NO: 6261

SEQ ID NO: 216369 - DNA, 591 bp, Canis familiaris; identical to SEQ ID NO: 6262

SEQ ID NO: 216370 - DNA, 482 bp, Canis familiaris; identical to SEQ ID NO: 6263

SEQ ID NO: 216371 - DNA, 312 bp, Canis familiaris; identical to SEQ ID NO: 6264
  misc_feature (21)..(21): n is a, c, g, or t
  misc_feature (35)..(35): n is a, c, g, or t

SEQ ID NO: 216372 - DNA, 673 bp, Canis familiaris; identical to SEQ ID NO: 6265
  misc_feature (517)..(517): n is a, c, g, or t
  misc_feature (529)..(529): n is a, c, g, or t
  misc_feature (544)..(545): n is a, c, g, or t
  misc_feature (555)..(556): n is a, c, g, or t
  misc_feature (586)..(586): n is a, c, g, or t
  misc_feature (601)..(601): n is a, c, g, or t

SEQ ID NO: 216373 - DNA, 485 bp, Canis familiaris; identical to SEQ ID NO: 6266

SEQ ID NO: 216374 - DNA, 566 bp, Canis familiaris; identical to SEQ ID NO: 6267

SEQ ID NO: 216375 - DNA, 633 bp, Canis familiaris; identical to SEQ ID NO: 6268

SEQ ID NO: 216376 - DNA, 605 bp, Canis familiaris; identical to SEQ ID NO: 6269

SEQ ID NO: 216377 - DNA, 573 bp, Canis familiaris; identical to SEQ ID NO: 6270

SEQ ID NO: 216378 - DNA, 681 bp, Canis familiaris; identical to SEQ ID NO: 6271

SEQ ID NO: 216379 - DNA, 374 bp, Canis familiaris; identical to SEQ ID NO: 6272

SEQ ID NO: 216380 - DNA, 413 bp, Canis familiaris; identical to SEQ ID NO: 6273
  misc_feature (66)..(66): n is a, c, g, or t
  misc_feature (262)..(262): n is a, c, g, or t
  misc_feature (280)..(281): n is a, c, g, or t
  misc_feature (292)..(293): n is a, c, g, or t
  misc_feature (297)..(297): n is a, c, g, or t

SEQ ID NO: 216381 - DNA, 677 bp, Canis familiaris; identical to SEQ ID NO: 6274
  misc_feature (528)..(528): n is a, c, g, or t

SEQ ID NO: 216382 - DNA, 619 bp, Canis familiaris; identical to SEQ ID NO: 6275

SEQ ID NO: 216383 - DNA, 663 bp, Canis familiaris; identical to SEQ ID NO: 6276

SEQ ID NO: 216384 - DNA, 673 bp, Canis familiaris; identical to SEQ ID NO: 6277

SEQ ID NO: 216385 - DNA, 633 bp, Canis familiaris; identical to SEQ ID NO: 6278

SEQ ID NO: 216386 - DNA, 593 bp, Canis familiaris; identical to SEQ ID NO: 6279

SEQ ID NO: 216387 - DNA, 606 bp, Canis familiaris; identical to SEQ ID NO: 6280

SEQ ID NO: 216388 - DNA, 609 bp, Canis familiaris; identical to SEQ ID NO: 6281
  misc_feature (1)..(1): n is a, c, g, or t
  misc_feature (463)..(463): n is a, c, g, or t

SEQ ID NO: 216389 - DNA, 620 bp, Canis familiaris; identical to SEQ ID NO: 6282

SEQ ID NO: 216390 - DNA, 107 bp, Canis familiaris; identical to SEQ ID NO: 6283

SEQ ID NO: 216391 - DNA, 637 bp, Canis familiaris; identical to SEQ ID NO: 6284

SEQ ID NO: 216392 - DNA, 649 bp, Canis familiaris; identical to SEQ ID NO: 6285

SEQ ID NO: 216393 - DNA, 626 bp, Canis familiaris; identical to SEQ ID NO: 6286

SEQ ID NO: 216394 - DNA, 614 bp, Canis familiaris; identical to SEQ ID NO: 6287

SEQ ID NO: 216395 - DNA, 425 bp, Canis familiaris; identical to SEQ ID NO: 6288

SEQ ID NO: 216396 - DNA, 446 bp, Canis familiaris; identical to SEQ ID NO: 6289

SEQ ID NO: 216397 - DNA, 667 bp, Canis familiaris; identical to SEQ ID NO: 6290

SEQ ID NO: 216398 - DNA, 305 bp, Canis familiaris; identical to SEQ ID NO: 6291

SEQ ID NO: 216399 - DNA, 555 bp, Canis familiaris; identical to SEQ ID NO: 6292

SEQ ID NO: 216400 - DNA, 606 bp, Canis familiaris; identical to SEQ ID NO: 6293

SEQ ID NO: 216401 - DNA, 647 bp, Canis familiaris; identical to SEQ ID NO: 6294

SEQ ID NO: 216402 - DNA, 650 bp, Canis familiaris; identical to SEQ ID NO: 6295

SEQ ID NO: 216403 - DNA, 600 bp, Canis familiaris; identical to SEQ ID NO: 6296

SEQ ID NO: 216404 - DNA, 185 bp, Canis familiaris; identical to SEQ ID NO: 6297

SEQ ID NO: 216405 - DNA, 585 bp, Canis familiaris; identical to SEQ ID NO: 6298

SEQ ID NO: 216406 - DNA, 613 bp, Canis familiaris; identical to SEQ ID NO: 6299

SEQ ID NO: 216407 - DNA, 654 bp, Canis familiaris; identical to SEQ ID NO: 6300

SEQ ID NO: 216408 - DNA, 696 bp, Canis familiaris; identical to SEQ ID NO: 6301

SEQ ID NO: 216409 - DNA, 572 bp, Canis familiaris; identical to SEQ ID NO: 6302

SEQ ID NO: 216410 - DNA, 584 bp, Canis familiaris; identical to SEQ ID NO: 6303

SEQ ID NO: 216411 - DNA, 592 bp, Canis familiaris; identical to SEQ ID NO: 6304

SEQ ID NO: 216412 - DNA, 580 bp, Canis familiaris; identical to SEQ ID NO: 6305

SEQ ID NO: 216413 - DNA, 549 bp, Canis familiaris; identical to SEQ ID NO: 6306

SEQ ID NO: 216414 - DNA, 639 bp, Canis familiaris; identical to SEQ ID NO: 6307

SEQ ID NO: 216415 - DNA, 638 bp, Canis familiaris; identical to SEQ ID NO: 6308

SEQ ID NO: 216416 - DNA, 682 bp, Canis familiaris; identical to SEQ ID NO: 6309

SEQ ID NO: 216417 - DNA, 532 bp, Canis familiaris; identical to SEQ ID NO: 6310

SEQ ID NO: 216418 - DNA, 602 bp, Canis familiaris; identical to SEQ ID NO: 6311

SEQ ID NO: 216419 - DNA, 591 bp, Canis familiaris; identical to SEQ ID NO: 6312

SEQ ID NO: 216420 - DNA, 607 bp, Canis familiaris; identical to SEQ ID NO: 6313

SEQ ID NO: 216421 - DNA, 640 bp, Canis familiaris; identical to SEQ ID NO: 6314

SEQ ID NO: 216422 - DNA, 629 bp, Canis familiaris; identical to SEQ ID NO: 6315

SEQ ID NO: 216423 - DNA, 587 bp, Canis familiaris; identical to SEQ ID NO: 6316

SEQ ID NO: 216424 - DNA, 650 bp, Canis familiaris; identical to SEQ ID NO: 6317

SEQ ID NO: 216425 - DNA, 637 bp, Canis familiaris; identical to SEQ ID NO: 6318

SEQ ID NO: 216426 - DNA, 644 bp, Canis familiaris; identical to SEQ ID NO: 6319

SEQ ID NO: 216427 - DNA, 561 bp, Canis familiaris; identical to SEQ ID NO: 6320

SEQ ID NO: 216428 - DNA, 624 bp, Canis familiaris; identical to SEQ ID NO: 6321

SEQ ID NO: 216429 - DNA, 673 bp, Canis familiaris; identical to SEQ ID NO: 6322

SEQ ID NO: 216430 - DNA, 519 bp, Canis familiaris; identical to SEQ ID NO: 6323

SEQ ID NO: 216431 - DNA, 511 bp, Canis familiaris; identical to SEQ ID NO: 6324

SEQ ID NO: 216432 - DNA, 662 bp, Canis familiaris; identical to SEQ ID NO: 6325

SEQ ID NO: 216433 - DNA, 597 bp, Canis familiaris; identical to SEQ ID NO: 6326

SEQ ID NO: 216434 - DNA, 168 bp, Canis familiaris; identical to SEQ ID NO: 6327

SEQ ID NO: 216435 - DNA, 530 bp, Canis familiaris; identical to SEQ ID NO: 6328

SEQ ID NO: 216436 - DNA, 607 bp, Canis familiaris; identical to SEQ ID NO: 6329

SEQ ID NO: 216437 - DNA, 136 bp, Canis familiaris; identical to SEQ ID NO: 6330

SEQ ID NO: 216438 - DNA, 568 bp, Canis familiaris; identical to SEQ ID NO: 6331

SEQ ID NO: 216439 - DNA, 608 bp, Canis familiaris; identical to SEQ ID NO: 6332

SEQ ID NO: 216440 - DNA, 516 bp, Canis familiaris; identical to SEQ ID NO: 6333

SEQ ID NO: 216441 - DNA, 565 bp, Canis familiaris; identical to SEQ ID NO: 6334

SEQ ID NO: 216442 - DNA, 543 bp, Canis familiaris; identical to SEQ ID NO: 6335

SEQ ID NO: 216443 - DNA, 585 bp, Canis familiaris; identical to SEQ ID NO: 6336

SEQ ID NO: 216444 - DNA, 651 bp, Canis familiaris; identical to SEQ ID NO: 6337

SEQ ID NO: 216445 - DNA, 603 bp, Canis familiaris; identical to SEQ ID NO: 6338

SEQ ID NO: 216446 - DNA, 579 bp, Canis familiaris; identical to SEQ ID NO: 6339

SEQ ID NO: 216447 - DNA, 529 bp, Canis familiaris; identical to SEQ ID NO: 6340

SEQ ID NO: 216448 - DNA, 575 bp, Canis familiaris; identical to SEQ ID NO: 6341

SEQ ID NO: 216449 - DNA, 592 bp, Canis familiaris; identical to SEQ ID NO: 6342

SEQ ID NO: 216450 - DNA, 623 bp, Canis familiaris; identical to SEQ ID NO: 6343

SEQ ID NO: 216451 - DNA, 593 bp, Canis familiaris; identical to SEQ ID NO: 6344

SEQ ID NO: 216452 - DNA, 597 bp, Canis familiaris; identical to SEQ ID NO: 6345

SEQ ID NO: 216453 - DNA, 503 bp, Canis familiaris; identical to SEQ ID NO: 6346

SEQ ID NO: 216454 - DNA, 535 bp, Canis familiaris; identical to SEQ ID NO: 6347
  misc_feature (1)..(1): n is a, c, g, or t

SEQ ID NO: 216455 - DNA, 621 bp, Canis familiaris; identical to SEQ ID NO: 6348

SEQ ID NO: 216456 - DNA, 620 bp, Canis familiaris; identical to SEQ ID NO: 6349

SEQ ID NO: 216457 - DNA, 615 bp, Canis familiaris; identical to SEQ ID NO: 6350

SEQ ID NO: 216458 - DNA, 693 bp, Canis familiaris; identical to SEQ ID NO: 6351

SEQ ID NO: 216459 - DNA, 649 bp, Canis familiaris; identical to SEQ ID NO: 6352

SEQ ID NO: 216460 - DNA, 438 bp, Canis familiaris; identical to SEQ ID NO: 6353

SEQ ID NO: 216461 - DNA, 152 bp, Canis familiaris; identical to SEQ ID NO: 6354

SEQ ID NO: 216462 - DNA, 567 bp, Canis familiaris; identical to SEQ ID NO: 6355

SEQ ID NO: 216463 - DNA, 401 bp, Canis familiaris; identical to SEQ ID NO: 6356

SEQ ID NO: 216464 - DNA, 519 bp, Canis familiaris; identical to SEQ ID NO: 6357

SEQ ID NO: 216465 - DNA, 622 bp, Canis familiaris; identical to SEQ ID NO: 6358

SEQ ID NO: 216466 - DNA, 143 bp, Canis familiaris; identical to SEQ ID NO: 6359

SEQ ID NO: 216467 - DNA, 629 bp, Canis familiaris; identical to SEQ ID NO: 6360

SEQ ID NO: 216468 - DNA, 591 bp, Canis familiaris; identical to SEQ ID NO: 6361

SEQ ID NO: 216469 - DNA, 628 bp, Canis familiaris; identical to SEQ ID NO: 6362

SEQ ID NO: 216470 - DNA, 587 bp, Canis familiaris; identical to SEQ ID NO: 6363

SEQ ID NO: 216471 - DNA, 669 bp, Canis familiaris; identical to SEQ ID NO: 6364
  misc_feature (60)..(60): n is a, c, g, or t

SEQ ID NO: 216472 - DNA, 496 bp, Canis familiaris; identical to SEQ ID NO: 6365
  misc_feature (14)..(14): n is a, c, g, or t
  misc_feature (41)..(41): n is a, c, g, or t

SEQ ID NO: 216473 - DNA, 642 bp, Canis familiaris; identical to SEQ ID NO: 6366
  misc_feature (44)..(44): n is a, c, g, or t

SEQ ID NO: 216474 - DNA, 518 bp, Canis familiaris; identical to SEQ ID NO: 6367

SEQ ID NO: 216475 - DNA, 603 bp, Canis familiaris; identical to SEQ ID NO: 6368

SEQ ID NO: 216476 - DNA, 618 bp, Canis familiaris; identical to SEQ ID NO: 6369

SEQ ID NO: 216477 - DNA, 703 bp, Canis familiaris; identical to SEQ ID NO: 6370

SEQ ID NO: 216478 - DNA, 607 bp, Canis familiaris; identical to SEQ ID NO: 6371

SEQ ID NO: 216479 - DNA, 584 bp, Canis familiaris; identical to SEQ ID NO: 6372
  misc_feature (267)..(267): n is a, c, g, or t

SEQ ID NO: 216480 - DNA, 267 bp, Canis familiaris; identical to SEQ ID NO: 6373

SEQ ID NO: 216481 - DNA, 726 bp, Canis familiaris; identical to SEQ ID NO: 6374

SEQ ID NO: 216482 - DNA, 551 bp, Canis familiaris; identical to SEQ ID NO: 6375

SEQ ID NO: 216483 - DNA, 601 bp, Canis familiaris; identical to SEQ ID NO: 6376

SEQ ID NO: 216484 - DNA, 525 bp, Canis familiaris; identical to SEQ ID NO: 6377

SEQ ID NO: 216485 - DNA, 657 bp, Canis familiaris; identical to SEQ ID NO: 6378
  misc_feature (299)..(299): n is a, c, g, or t

SEQ ID NO: 216486 - DNA, 544 bp, Canis familiaris; identical to SEQ ID NO: 6379

SEQ ID NO: 216487 - DNA, 545 bp, Canis familiaris; identical to SEQ ID NO: 6380

SEQ ID NO: 216488 - DNA, 682 bp, Canis familiaris; identical to SEQ ID NO: 6381

SEQ ID NO: 216489 - DNA, 655 bp, Canis familiaris; identical to SEQ ID NO: 6382

SEQ ID NO: 216490 - DNA, 780 bp, Canis familiaris; identical to SEQ ID NO: 6383

SEQ ID NO: 216491 - DNA, 614 bp, Canis familiaris; identical to SEQ ID NO: 6384

SEQ ID NO: 216492 - DNA, 546 bp, Canis familiaris; identical to SEQ ID NO: 6385

SEQ ID NO: 216493 - DNA, 556 bp, Canis familiaris; identical to SEQ ID NO: 6386

SEQ ID NO: 216494 - DNA, 507 bp, Canis familiaris; identical to SEQ ID NO: 6387

SEQ ID NO: 216495 - DNA, 205 bp, Canis familiaris; identical to SEQ ID NO: 6388

SEQ ID NO: 216496 - DNA, 533 bp, Canis familiaris; identical to SEQ ID NO: 6389
  misc_feature (1)..(1): n is a, c, g, or t

SEQ ID NO: 216497 - DNA, 632 bp, Canis familiaris; identical to SEQ ID NO: 6390

SEQ ID NO: 216498 - DNA, 572 bp, Canis familiaris; identical to SEQ ID NO: 6391

SEQ ID NO: 216499 - DNA, 606 bp, Canis familiaris; identical to SEQ ID NO: 6392

SEQ ID NO: 216500 - DNA, 591 bp, Canis familiaris; identical to SEQ ID NO: 6393

SEQ ID NO: 216501 - DNA, 586 bp, Canis familiaris; identical to SEQ ID NO: 6394

SEQ ID NO: 216502 - DNA, 696 bp, Canis familiaris; identical to SEQ ID NO: 6395

SEQ ID NO: 216503 - DNA, 553 bp, Canis familiaris; identical to SEQ ID NO: 6396

SEQ ID NO: 216504 - DNA, 667 bp, Canis familiaris; identical to SEQ ID NO: 6397

SEQ ID NO: 216505 - DNA, 671 bp, Canis familiaris; identical to SEQ ID NO: 6398

SEQ ID NO: 216506 - DNA, 667 bp, Canis familiaris; identical to SEQ ID NO: 6399

SEQ ID NO: 216507 - DNA, 571 bp, Canis familiaris; identical to SEQ ID NO: 6400

SEQ ID NO: 216508 - DNA, 728 bp, Canis familiaris; identical to SEQ ID NO: 6401

SEQ ID NO: 216509 - DNA, 504 bp, Canis familiaris; identical to SEQ ID NO: 6402

SEQ ID NO: 216510 - DNA, 582 bp, Canis familiaris; identical to SEQ ID NO: 6403
  misc_feature (1)..(1): n is a, c, g, or t

SEQ ID NO: 216511 - DNA, 528 bp, Canis familiaris; identical to SEQ ID NO: 6404
  misc_feature (1)..(1): n is a, c, g, or t

SEQ ID NO: 216512 - DNA, 636 bp, Canis familiaris; identical to SEQ ID NO: 6405

SEQ ID NO: 216513 - DNA, 581 bp, Canis familiaris; identical to SEQ ID NO: 6406

SEQ ID NO: 216514 - DNA, 529 bp, Canis familiaris; identical to SEQ ID NO: 6407

SEQ ID NO: 216515 - DNA, 674 bp, Canis familiaris; identical to SEQ ID NO: 6408

SEQ ID NO: 216516 - DNA, 553 bp, Canis familiaris; identical to SEQ ID NO: 6409

SEQ ID NO: 216517 - DNA, 629 bp, Canis familiaris; identical to SEQ ID NO: 6410

SEQ ID NO: 216518 - DNA, 643 bp, Canis familiaris; identical to SEQ ID NO: 6411

SEQ ID NO: 216519 - DNA, 583 bp, Canis familiaris; identical to SEQ ID NO: 6412

SEQ ID NO: 216520 - DNA, 456 bp, Canis familiaris; identical to SEQ ID NO: 6413
  misc_feature (102)..(102): n is a, c, g, or t

SEQ ID NO: 216521 - DNA, 620 bp, Canis familiaris; identical to SEQ ID NO: 6414

SEQ ID NO: 216522 - DNA, 179 bp, Canis familiaris; identical to SEQ ID NO: 6415

SEQ ID NO: 216523 - DNA, 578 bp, Canis familiaris; identical to SEQ ID NO: 6416

SEQ ID NO: 216524 - DNA, 518 bp, Canis familiaris; identical to SEQ ID NO: 6417

SEQ ID NO: 216525 - DNA, 501 bp, Canis familiaris; identical to SEQ ID NO: 6418

SEQ ID NO: 216526 - DNA, 710 bp, Canis familiaris; identical to SEQ ID NO: 6419

SEQ ID NO: 216527 - DNA, 753 bp, Canis familiaris; identical to SEQ ID NO: 6420

SEQ ID NO: 216528 - DNA, 621 bp, Canis familiaris; identical to SEQ ID NO: 6421

SEQ ID NO: 216529 - DNA, 573 bp, Canis familiaris; identical to SEQ ID NO: 6422

SEQ ID NO: 216530 - DNA, 628 bp, Canis familiaris; identical to SEQ ID NO: 6423

SEQ ID NO: 216531 - DNA, 572 bp, Canis familiaris; identical to SEQ ID NO: 6424

SEQ ID NO: 216532 - DNA, 614 bp, Canis familiaris; identical to SEQ ID NO: 6425

SEQ ID NO: 216533 - DNA, 596 bp, Canis familiaris; identical to SEQ ID NO: 6426

SEQ ID NO: 216534 - DNA, 508 bp, Canis familiaris; identical to SEQ ID NO: 6427

SEQ ID NO: 216535 - DNA, 620 bp, Canis familiaris; identical to SEQ ID NO: 6428
  misc_feature (48)..(48): n is a, c, g, or t

SEQ ID NO: 216536 - DNA, 626 bp, Canis familiaris; identical to SEQ ID NO: 6429

SEQ ID NO: 216537 - DNA, 597 bp, Canis familiaris; identical to SEQ ID NO: 6430

SEQ ID NO: 216538 - DNA, 662 bp, Canis familiaris; identical to SEQ ID NO: 6431

SEQ ID NO: 216539 - DNA, 647 bp, Canis familiaris; identical to SEQ ID NO: 6432

SEQ ID NO: 216540 - DNA, 619 bp, Canis familiaris; identical to SEQ ID NO: 6433
  misc_feature (248)..(248): n is a, c, g, or t

SEQ ID NO: 216541 - DNA, 593 bp, Canis familiaris; identical to SEQ ID NO: 6434

SEQ ID NO: 216542 - DNA, 601 bp, Canis familiaris; identical to SEQ ID NO: 6435

SEQ ID NO: 216543 - DNA, 650 bp, Canis familiaris; identical to SEQ ID NO: 6436
  misc_feature (1)..(1): n is a, c, g, or t

SEQ ID NO: 216544 - DNA, 577 bp, Canis familiaris; identical to SEQ ID NO: 6437

SEQ ID NO: 216545 - DNA, 612 bp, Canis familiaris; identical to SEQ ID NO: 6438

SEQ ID NO: 216546 - DNA, 644 bp, Canis familiaris; identical to SEQ ID NO: 6439
  misc_feature (21)..(21): n is a, c, g, or t

SEQ ID NO: 216547 - DNA, 605 bp, Canis familiaris; identical to SEQ ID NO: 6440

SEQ ID NO: 216548 - DNA, 560 bp, Canis familiaris; identical to SEQ ID NO: 6441

SEQ ID NO: 216549 - DNA, 596 bp, Canis familiaris; identical to SEQ ID NO: 6442

SEQ ID NO: 216550 - DNA, 649 bp, Canis familiaris; identical to SEQ ID NO: 6443

SEQ ID NO: 216551 - DNA, 645 bp, Canis familiaris; identical to SEQ ID NO: 6444

SEQ ID NO: 216552 - DNA, 593 bp, Canis familiaris; identical to SEQ ID NO: 6445
  misc_feature (308)..(308): n is a, c, g, or t

SEQ ID NO: 216553 - DNA, 668 bp, Canis familiaris; identical to SEQ ID NO: 6446

SEQ ID NO: 216554 - DNA, 555 bp, Canis familiaris; identical to SEQ ID NO: 6447

SEQ ID NO: 216555 - DNA, 586 bp, Canis familiaris; identical to SEQ ID NO: 6448

SEQ ID NO: 216556 - DNA, 544 bp, Canis familiaris; identical to SEQ ID NO: 6449

SEQ ID NO: 216557 - DNA, 649 bp, Canis familiaris; identical to SEQ ID NO: 6450

SEQ ID NO: 216558 - DNA, 583 bp, Canis familiaris; identical to SEQ ID NO: 6451

SEQ ID NO: 216559 - DNA, 584 bp, Canis familiaris; identical to SEQ ID NO: 6452
  misc_feature (104)..(104): n is a, c, g, or t
  misc_feature (261)..(261): n is a, c, g, or t

SEQ ID NO: 216560 - DNA, 536 bp, Canis familiaris; identical to SEQ ID NO: 6453

SEQ ID NO: 216561 - DNA, 618 bp, Canis familiaris; identical to SEQ ID NO: 6454
  misc_feature (1)..(1): n is a, c, g, or t

SEQ ID NO: 216562 - DNA, 543 bp, Canis familiaris; identical to SEQ ID NO: 6455

SEQ ID NO: 216563 - DNA, 627 bp, Canis familiaris; identical to SEQ ID NO: 6456

SEQ ID NO: 216564 - DNA, 610 bp, Canis familiaris; identical to SEQ ID NO: 6457

SEQ ID NO: 216565 - DNA, 575 bp, Canis familiaris; identical to SEQ ID NO: 6458
  misc_feature (46)..(46): n is a, c, g, or t

SEQ ID NO: 216566 - DNA, 585 bp, Canis familiaris; identical to SEQ ID NO: 6459

SEQ ID NO: 216567 - DNA, 617 bp, Canis familiaris; identical to SEQ ID NO: 6460

SEQ ID NO: 216568 - DNA, 608 bp, Canis familiaris; identical to SEQ ID NO: 6461

SEQ ID NO: 216569 - DNA, 628 bp, Canis familiaris; identical to SEQ ID NO: 6462
  misc_feature (1)..(1): n is a, c, g, or t

SEQ ID NO: 216570 - DNA, 589 bp, Canis familiaris; identical to SEQ ID NO: 6463

SEQ ID NO: 216571 - DNA, 516 bp, Canis familiaris; identical to SEQ ID NO: 6464

SEQ ID NO: 216572 - DNA, 572 bp, Canis familiaris; identical to SEQ ID NO: 6465

SEQ ID NO: 216573 - DNA, 303 bp, Canis familiaris; identical to SEQ ID NO: 6466

SEQ ID NO: 216574 - DNA, 538 bp, Canis familiaris; identical to SEQ ID NO: 6467

SEQ ID NO: 216575 - DNA, 619 bp, Canis familiaris; identical to SEQ ID NO: 6468

SEQ ID NO: 216576 - DNA, 581 bp, Canis familiaris; identical to SEQ ID NO: 6469

SEQ ID NO: 216577 - DNA, 592 bp, Canis familiaris; identical to SEQ ID NO: 6470

SEQ ID NO: 216578 - DNA, 570 bp, Canis familiaris; identical to SEQ ID NO: 6471

SEQ ID NO: 216579 - DNA, 630 bp, Canis familiaris; identical to SEQ ID NO: 6472

SEQ ID NO: 216580 - DNA, 192 bp, Canis familiaris; identical to SEQ ID NO: 6473

SEQ ID NO: 216581 - DNA, 663 bp, Canis familiaris; identical to SEQ ID NO: 6474

SEQ ID NO: 216582 - DNA, 535 bp, Canis familiaris; identical to SEQ ID NO: 6475
  misc_feature (181)..(181): n is a, c, g, or t

SEQ ID NO: 216583 - DNA, 597 bp, Canis familiaris; identical to SEQ ID NO: 6476

SEQ ID NO: 216584 - DNA, 646 bp, Canis familiaris; identical to SEQ ID NO: 6477

SEQ ID NO: 216585 - DNA, 501 bp, Canis familiaris; identical to SEQ ID NO: 6478

SEQ ID NO: 216586 - DNA, 599 bp, Canis familiaris; identical to SEQ ID NO: 6479

SEQ ID NO: 216587 - DNA, 637 bp, Canis familiaris; identical to SEQ ID NO: 6480

SEQ ID NO: 216588 - DNA, 631 bp, Canis familiaris; identical to SEQ ID NO: 6481

SEQ ID NO: 216589 - DNA, 564 bp, Canis familiaris; identical to SEQ ID NO: 6482

SEQ ID NO: 216590 - DNA, 586 bp, Canis familiaris; identical to SEQ ID NO: 6483

SEQ ID NO: 216591 - DNA, 527 bp, Canis familiaris; identical to SEQ ID NO: 6484

SEQ ID NO: 216592 - DNA, 584 bp, Canis familiaris; identical to SEQ ID NO: 6485
  misc_feature (141)..(141): n is a, c, g, or t

SEQ ID NO: 216593 - DNA, 557 bp, Canis familiaris; identical to SEQ ID NO: 6486

SEQ ID NO: 216594 - DNA, 592 bp, Canis familiaris; identical to SEQ ID NO: 6487

SEQ ID NO: 216595 - DNA, 488 bp, Canis familiaris; identical to SEQ ID NO: 6488

SEQ ID NO: 216596 - DNA, 533 bp, Canis familiaris; identical to SEQ ID NO: 6489

SEQ ID NO: 216597 - DNA, 562 bp, Canis familiaris; identical to SEQ ID NO: 6490

SEQ ID NO: 216598 - DNA, 633 bp, Canis familiaris; identical to SEQ ID NO: 6491

SEQ ID NO: 216599 - DNA, 497 bp, Canis familiaris; identical to SEQ ID NO: 6492

SEQ ID NO: 216600 - DNA, 641 bp, Canis familiaris; identical to SEQ ID NO: 6493

SEQ ID NO: 216601 - DNA, 584 bp, Canis familiaris; identical to SEQ ID NO: 6494

SEQ ID NO: 216602 - DNA, 580 bp, Canis familiaris; identical to SEQ ID NO: 6495

SEQ ID NO: 216603 - DNA, 549 bp, Canis familiaris; identical to SEQ ID NO: 6496

SEQ ID NO: 216604 - DNA, 642 bp, Canis familiaris; identical to SEQ ID NO: 6497

SEQ ID NO: 216605 - DNA, 513 bp, Canis familiaris; identical to SEQ ID NO: 6498

SEQ ID NO: 216606 - DNA, 640 bp, Canis familiaris; identical to SEQ ID NO: 6499
  misc_feature (1)..(1): n is a, c, g, or t

SEQ ID NO: 216607 - DNA, 501 bp, Canis familiaris; identical to SEQ ID NO: 6500

SEQ ID NO: 216608 - DNA, 675 bp, Canis familiaris; identical to SEQ ID NO: 6501

SEQ ID NO: 216609 - DNA, 592 bp, Canis familiaris; identical to SEQ ID NO: 6502

SEQ ID NO: 216610 - DNA, 661 bp, Canis familiaris; identical to SEQ ID NO: 6503
  misc_feature (439)..(439): n is a, c, g, or t

SEQ ID NO: 216611 - DNA, 711 bp, Canis familiaris; identical to SEQ ID NO: 6504

SEQ ID NO: 216612 - DNA, 653 bp, Canis familiaris; identical to SEQ ID NO: 6505

SEQ ID NO: 216613 - DNA, 610 bp, Canis familiaris; identical to SEQ ID NO: 6506

SEQ ID NO: 216614 - DNA, 626 bp, Canis familiaris; identical to SEQ ID NO: 6507
  misc_feature (35)..(36): n is a, c, g, or t

SEQ ID NO: 216615 - DNA, 598 bp, Canis familiaris; identical to SEQ ID NO: 6508

SEQ ID NO: 216616 - DNA, 559 bp, Canis familiaris; identical to SEQ ID NO: 6509

SEQ ID NO: 216617 - DNA, 649 bp, Canis familiaris; identical to SEQ ID NO: 6510

SEQ ID NO: 216618 - DNA, 591 bp, Canis familiaris; identical to SEQ ID NO: 6511

SEQ ID NO: 216619 - DNA, 587 bp, Canis familiaris; identical to SEQ ID NO: 6512

SEQ ID NO: 216620 - DNA, 569 bp, Canis familiaris; identical to SEQ ID NO: 6513

SEQ ID NO: 216621 - DNA, 573 bp, Canis familiaris; identical to SEQ ID NO: 6514

SEQ ID NO: 216622 - DNA, 467 bp, Canis familiaris; identical to SEQ ID NO: 6515

SEQ ID NO: 216623 - DNA, 650 bp, Canis familiaris; identical to SEQ ID NO: 6516

SEQ ID NO: 216624 - DNA, 505 bp, Canis familiaris; identical to SEQ ID NO: 6517

SEQ ID NO: 216625 - DNA, 623 bp, Canis familiaris; identical to SEQ ID NO: 6518

SEQ ID NO: 216626 - DNA, 571 bp, Canis familiaris; identical to SEQ ID NO: 6519

SEQ ID NO: 216627 - DNA, 559 bp, Canis familiaris; identical to SEQ ID NO: 6520

SEQ ID NO: 216628 - DNA, 606 bp, Canis familiaris; identical to SEQ ID NO: 6521

SEQ ID NO: 216629 - DNA, 609 bp, Canis familiaris; identical to SEQ ID NO: 6522

SEQ ID NO: 216630 - DNA, 571 bp, Canis familiaris; identical to SEQ ID NO: 6523

SEQ ID NO: 216631 - DNA, 586 bp, Canis familiaris; identical to SEQ ID NO: 6524

SEQ ID NO: 216632 - DNA, 568 bp, Canis familiaris; identical to SEQ ID NO: 6525

SEQ ID NO: 216633 - DNA, 624 bp, Canis familiaris; identical to SEQ ID NO: 6526

SEQ ID NO: 216634 - DNA, 620 bp, Canis familiaris; identical to SEQ ID NO: 6527

SEQ ID NO: 216635 - DNA, 622 bp, Canis familiaris; identical to SEQ ID NO: 6528

SEQ ID NO: 216636 - DNA, 610 bp, Canis familiaris; identical to SEQ ID NO: 6529

SEQ ID NO: 216637 - DNA, 679 bp, Canis familiaris; identical to SEQ ID NO: 6530

SEQ ID NO: 216638 - DNA, 640 bp, Canis familiaris; identical to SEQ ID NO: 6531

SEQ ID NO: 216639 - DNA, 723 bp, Canis familiaris; identical to SEQ ID NO: 6532
  misc_feature (1)..(1): n is a, c, g, or t

SEQ ID NO: 216640 - DNA, 722 bp, Canis familiaris; identical to SEQ ID NO: 6533
  misc_feature (57)..(57): n is a, c, g, or t

SEQ ID NO: 216641 - DNA, 120 bp, Canis familiaris; identical to SEQ ID NO: 6534

SEQ ID NO: 216642 - DNA, 648 bp, Canis familiaris; identical to SEQ ID NO: 6535

SEQ ID NO: 216643 - DNA, 575 bp, Canis familiaris; identical to SEQ ID NO: 6536

SEQ ID NO: 216644 - DNA, 591 bp, Canis familiaris; identical to SEQ ID NO: 6537

SEQ ID NO: 216645 - DNA, 668 bp, Canis familiaris; identical to SEQ ID NO: 6538

SEQ ID NO: 216646 - DNA, 628 bp, Canis familiaris; identical to SEQ ID NO: 6539

SEQ ID NO: 216647 - DNA, 619 bp, Canis familiaris; identical to SEQ ID NO: 6540

SEQ ID NO: 216648 - DNA, 643 bp, Canis familiaris; identical to SEQ ID NO: 6541

SEQ ID NO: 216649 - DNA, 385 bp, Canis familiaris; identical to SEQ ID NO: 6542

SEQ ID NO: 216650 - DNA, 438 bp, Canis familiaris; identical to SEQ ID NO: 6543

SEQ ID NO: 216651 - DNA, 669 bp, Canis familiaris; identical to SEQ ID NO: 6544

SEQ ID NO: 216652 - DNA, 610 bp, Canis familiaris; identical to SEQ ID NO: 6545

SEQ ID NO: 216653 - DNA, 560 bp, Canis familiaris; identical to SEQ ID NO: 6546

SEQ ID NO: 216654 - DNA, 663 bp, Canis familiaris; identical to SEQ ID NO: 6547

SEQ ID NO: 216655 - DNA, 628 bp, Canis familiaris; identical to SEQ ID NO: 6548

SEQ ID NO: 216656 - DNA, 294 bp, Canis familiaris; identical to SEQ ID NO: 6549

SEQ ID NO: 216657 - DNA, 642 bp, Canis familiaris; identical to SEQ ID NO: 6550

SEQ ID NO: 216658 - DNA, 506 bp, Canis familiaris; identical to SEQ ID NO: 6551

SEQ ID NO: 216659 - DNA, 620 bp, Canis familiaris; identical to SEQ ID NO: 6552

SEQ ID NO: 216660 - DNA, 544 bp, Canis familiaris; identical to SEQ ID NO: 6553

SEQ ID NO: 216661 - DNA, 624 bp, Canis familiaris; identical to SEQ ID NO: 6554

SEQ ID NO: 216662 - DNA, 616 bp, Canis familiaris; identical to SEQ ID NO: 6555

SEQ ID NO: 216663 - DNA, 651 bp, Canis familiaris; identical to SEQ ID NO: 6556

SEQ ID NO: 216664 - DNA, 624 bp, Canis familiaris; identical to SEQ ID NO: 6557

SEQ ID NO: 216665 - DNA, 528 bp, Canis familiaris; identical to SEQ ID NO: 6558

SEQ ID NO: 216666 - DNA, 357 bp, Canis familiaris; identical to SEQ ID NO: 6559
  misc_feature (1)..(1): n is a, c, g, or t
  misc_feature (189)..(189): n is a, c, g, or t

SEQ ID NO: 216667 - DNA, 575 bp, Canis familiaris; identical to SEQ ID NO: 6560
  misc_feature (8)..(8): n is a, c, g, or t

SEQ ID NO: 216668 - DNA, 579 bp, Canis familiaris; identical to SEQ ID NO: 6561

SEQ ID NO: 216669 - DNA, 523 bp, Canis familiaris; identical to SEQ ID NO: 6562

SEQ ID NO: 216670 - DNA, 558 bp, Canis familiaris; identical to SEQ ID NO: 6563

SEQ ID NO: 216671 - DNA, 650 bp, Canis familiaris; identical to SEQ ID NO: 6564

SEQ ID NO: 216672 - DNA, 604 bp, Canis familiaris; identical to SEQ ID NO: 6565

SEQ ID NO: 216673 - DNA, 565 bp, Canis familiaris; identical to SEQ ID NO: 6566

SEQ ID NO: 216674 - DNA, 546 bp, Canis familiaris; identical to SEQ ID NO: 6567

SEQ ID NO: 216675 - DNA, 638 bp, Canis familiaris; identical to SEQ ID NO: 6568
  misc_feature (90)..(90): n is a, c, g, or t

SEQ ID NO: 216676 - DNA, 706 bp, Canis familiaris; identical to SEQ ID NO: 6569
  misc_feature (78)..(78): n is a, c, g, or t

SEQ ID NO: 216677 - DNA, 592 bp, Canis familiaris; identical to SEQ ID NO: 6570

SEQ ID NO: 216678 - DNA, 663 bp, Canis familiaris; identical to SEQ ID NO: 6571

SEQ ID NO: 216679 - DNA, 614 bp, Canis familiaris; identical to SEQ ID NO: 6572

SEQ ID NO: 216680 - DNA, 454 bp, Canis familiaris; identical to SEQ ID NO: 6573

SEQ ID NO: 216681 - DNA, 502 bp, Canis familiaris; identical to SEQ ID NO: 6574

SEQ ID NO: 216682 - DNA, 560 bp, Canis familiaris; identical to SEQ ID NO: 6575

SEQ ID NO: 216683 - DNA, 631 bp, Canis familiaris; identical to SEQ ID NO: 6576
  misc_feature (1)..(1): n is a, c, g, or t

SEQ ID NO: 216684 - DNA, 689 bp, Canis familiaris; identical to SEQ ID NO: 6577

SEQ ID NO: 216685 - DNA, 517 bp, Canis familiaris; identical to SEQ ID NO: 6578

SEQ ID NO: 216686 - DNA, 639 bp, Canis familiaris; identical to SEQ ID NO: 6579

SEQ ID NO: 216687 - DNA, 602 bp, Canis familiaris; identical to SEQ ID NO: 6580

SEQ ID NO: 216688 - DNA, 543 bp, Canis familiaris; identical to SEQ ID NO: 6581

SEQ ID NO: 216689 - DNA, 637 bp, Canis familiaris; identical to SEQ ID NO: 6582

SEQ ID NO: 216690 - DNA, 576 bp, Canis familiaris; identical to SEQ ID NO: 6583

SEQ ID NO: 216691 - DNA, 613 bp, Canis familiaris; identical to SEQ ID NO: 6584
  misc_feature (1)..(1): n is a, c, g, or t

SEQ ID NO: 216692 - DNA, 617 bp, Canis familiaris; identical to SEQ ID NO: 6585

SEQ ID NO: 216693 - DNA, 675 bp, Canis familiaris; identical to SEQ ID NO: 6586

SEQ ID NO: 216694 - DNA, 584 bp, Canis familiaris; identical to SEQ ID NO: 6587

SEQ ID NO: 216695 - DNA, 608 bp, Canis familiaris; identical to SEQ ID NO: 6588

SEQ ID NO: 216696 - DNA, 635 bp, Canis familiaris; identical to SEQ ID NO: 6589

SEQ ID NO: 216697 - DNA, 477 bp, Canis familiaris; identical to SEQ ID NO: 6590

SEQ ID NO: 216698 - DNA, 495 bp, Canis familiaris; identical to SEQ ID NO: 6591

SEQ ID NO: 216699 - DNA, 477 bp, Canis familiaris; identical to SEQ ID NO: 6592
  misc_feature (1)..(1): n is a, c, g, or t

SEQ ID NO: 216700 - DNA, 563 bp, Canis familiaris; identical to SEQ ID NO: 6593

SEQ ID NO: 216701 - DNA, 461 bp, Canis familiaris; identical to SEQ ID NO: 6594

SEQ ID NO: 216702 - DNA, 569 bp, Canis familiaris; identical to SEQ ID NO: 6595

SEQ ID NO: 216703 - DNA, 638 bp, Canis familiaris; identical to SEQ ID NO: 6596

SEQ ID NO: 216704 - DNA, 618 bp, Canis familiaris; identical to SEQ ID NO: 6597

SEQ ID NO: 216705 - DNA, 586 bp, Canis familiaris; identical to SEQ ID NO: 6598

SEQ ID NO: 216706 - DNA, 564 bp, Canis familiaris; identical to SEQ ID NO: 6599

SEQ ID NO: 216707 - DNA, 603 bp, Canis familiaris; identical to SEQ ID NO: 6600
  misc_feature (371)..(371): n is a, c, g, or t

SEQ ID NO: 216708 - DNA, 622 bp, Canis familiaris; identical to SEQ ID NO: 6601

SEQ ID NO: 216709 - DNA, 636 bp, Canis familiaris; identical to SEQ ID NO: 6602

SEQ ID NO: 216710 - DNA, 610 bp, Canis familiaris; identical to SEQ ID NO: 6603

SEQ ID NO: 216711 - DNA, 623 bp, Canis familiaris; identical to SEQ ID NO: 6604

SEQ ID NO: 216712 - DNA, 619 bp, Canis familiaris; identical to SEQ ID NO: 6605

SEQ ID NO: 216713 - DNA, 604 bp, Canis familiaris; identical to SEQ ID NO: 6606

SEQ ID NO: 216714 - DNA, 625 bp, Canis familiaris; identical to SEQ ID NO: 6607

SEQ ID NO: 216715 - DNA, 674 bp, Canis familiaris; identical to SEQ ID NO: 6608

SEQ ID NO: 216716 - DNA, 546 bp, Canis familiaris; identical to SEQ ID NO: 6609

SEQ ID NO: 216717 - DNA, 564 bp, Canis familiaris; identical to SEQ ID NO: 6610

SEQ ID NO: 216718 - DNA, 594 bp, Canis familiaris; identical to SEQ ID NO: 6611

SEQ ID NO: 216719 - DNA, 644 bp, Canis familiaris; identical to SEQ ID NO: 6612
  misc_feature (565)..(565): n is a, c, g, or t

SEQ ID NO: 216720 - DNA, 610 bp, Canis familiaris; identical to SEQ ID NO: 6613

SEQ ID NO: 216721 - DNA, 645 bp, Canis familiaris; identical to SEQ ID NO: 6614
  misc_feature (170)..(170): n is a, c, g, or t

SEQ ID NO: 216722 - DNA, 586 bp, Canis familiaris; identical to SEQ ID NO: 6615

SEQ ID NO: 216723 - DNA, 642 bp, Canis familiaris; identical to SEQ ID NO: 6616

SEQ ID NO: 216724 - DNA, 598 bp, Canis familiaris; identical to SEQ ID NO: 6617

SEQ ID NO: 216725 - DNA, 620 bp, Canis familiaris; identical to SEQ ID NO: 6618

SEQ ID NO: 216726 - DNA, 641 bp, Canis familiaris; identical to SEQ ID NO: 6619

SEQ ID NO: 216727 - DNA, 596 bp, Canis familiaris; identical to SEQ ID NO: 6620
  misc_feature (1)..(1): n is a, c, g, or t

SEQ ID NO: 216728 - DNA, 591 bp, Canis familiaris; identical to SEQ ID NO: 6621

SEQ ID NO: 216729 - DNA, 634 bp, Canis familiaris; identical to SEQ ID NO: 6622

SEQ ID NO: 216730 - DNA, 605 bp, Canis familiaris; identical to SEQ ID NO: 6623

SEQ ID NO: 216731 - DNA, 527 bp, Canis familiaris; identical to SEQ ID NO: 6624

SEQ ID NO: 216732 - DNA, 616 bp, Canis familiaris; identical to SEQ ID NO: 6625

SEQ ID NO: 216733 - DNA, 709 bp, Canis familiaris; identical to SEQ ID NO: 6626

SEQ ID NO: 216734 - DNA, 576 bp, Canis familiaris; identical to SEQ ID NO: 6627
  misc_feature (1)..(1): n is a, c, g, or t

SEQ ID NO: 216735 - DNA, 638 bp, Canis familiaris; identical to SEQ ID NO: 6628
  misc_feature (112)..(112): n is a, c, g, or t
  misc_feature (229)..(229): n is a, c, g, or t

SEQ ID NO: 216736 - DNA, 657 bp, Canis familiaris; identical to SEQ ID NO: 6629

SEQ ID NO: 216737 - DNA, 612 bp, Canis familiaris; identical to SEQ ID NO: 6630

SEQ ID NO: 216738 - DNA, 504 bp, Canis familiaris; identical to SEQ ID NO: 6631

SEQ ID NO: 216739 - DNA, 598 bp, Canis familiaris; identical to SEQ ID NO: 6632

SEQ ID NO: 216740 - DNA, 561 bp, Canis familiaris; identical to SEQ ID NO: 6633

SEQ ID NO: 216741 - DNA, 475 bp, Canis familiaris; identical to SEQ ID NO: 6634

SEQ ID NO: 216742 - DNA, 519 bp, Canis familiaris; identical to SEQ ID NO: 6635

SEQ ID NO: 216743 - DNA, 558 bp, Canis familiaris; identical to SEQ ID NO: 6636
  misc_feature (135)..(135): n is a, c, g, or t

SEQ ID NO: 216744 - DNA, 660 bp, Canis familiaris; identical to SEQ ID NO: 6637

SEQ ID NO: 216745 - DNA, 565 bp, Canis familiaris; identical to SEQ ID NO: 6638
  misc_feature (1)..(1): n is a, c, g, or t

SEQ ID NO: 216746 - DNA, 417 bp, Canis familiaris; identical to SEQ ID NO: 6639

SEQ ID NO: 216747 - DNA, 246 bp, Canis familiaris; identical to SEQ ID NO: 6640
  misc_feature (1)..(1): n is a, c, g, or t

SEQ ID NO: 216748 - DNA, 616 bp, Canis familiaris; identical to SEQ ID NO: 6641

SEQ ID NO: 216749 - DNA, 618 bp, Canis familiaris; identical to SEQ ID NO: 6642

SEQ ID NO: 216750 - DNA, 515 bp, Canis familiaris; identical to SEQ ID NO: 6643

SEQ ID NO: 216751 - DNA, 635 bp, Canis familiaris; identical to SEQ ID NO: 6644

SEQ ID NO: 216752 - DNA, 598 bp, Canis familiaris; identical to SEQ ID NO: 6645

SEQ ID NO: 216753 - DNA, 615 bp, Canis familiaris; identical to SEQ ID NO: 6646

SEQ ID NO: 216754 - DNA, 603 bp, Canis familiaris; identical to SEQ ID NO: 6647

SEQ ID NO: 216755 - DNA, 525 bp, Canis familiaris; identical to SEQ ID NO: 6648

SEQ ID NO: 216756 - DNA, 614 bp, Canis familiaris; identical to SEQ ID NO: 6649

SEQ ID NO: 216757 - DNA, 614 bp, Canis familiaris; identical to SEQ ID NO: 6650

SEQ ID NO: 216758 - DNA, 673 bp, Canis familiaris; identical to SEQ ID NO: 6651

SEQ ID NO: 216759 - DNA, 573 bp, Canis familiaris; identical to SEQ ID NO: 6652

SEQ ID NO: 216760 - DNA, 557 bp, Canis familiaris; identical to SEQ ID NO: 6653

SEQ ID NO: 216761 - DNA, 582 bp, Canis familiaris; identical to SEQ ID NO: 6654

SEQ ID NO: 216762 - DNA, 631 bp, Canis familiaris; identical to SEQ ID NO: 6655

SEQ ID NO: 216763 - DNA, 600 bp, Canis familiaris; identical to SEQ ID NO: 6656

SEQ ID NO: 216764 - DNA, 657 bp, Canis familiaris; identical to SEQ ID NO: 6657

SEQ ID NO: 216765 - DNA, 596 bp, Canis familiaris; identical to SEQ ID NO: 6658
  misc_feature (18)..(18): n is a, c, g, or t

SEQ ID NO: 216766 - DNA, 572 bp, Canis familiaris; identical to SEQ ID NO: 6659
  misc_feature (179)..(179): n is a, c, g, or t

SEQ ID NO: 216767 - DNA, 646 bp, Canis familiaris; identical to SEQ ID NO: 6660

SEQ ID NO: 216768 - DNA, 494 bp, Canis familiaris; identical to SEQ ID NO: 6661

SEQ ID NO: 216769 - DNA, 502 bp, Canis familiaris; identical to SEQ ID NO: 6662

SEQ ID NO: 216770 - DNA, 622 bp, Canis familiaris; identical to SEQ ID NO: 6663

SEQ ID NO: 216771 - DNA, 437 bp, Canis familiaris; identical to SEQ ID NO: 6664

SEQ ID NO: 216772 - DNA, 609 bp, Canis familiaris; identical to SEQ ID NO: 6665
  misc_feature (484)..(485): n is a, c, g, or t

SEQ ID NO: 216773 - DNA, 631 bp, Canis familiaris; identical to SEQ ID NO: 6666
  misc_feature (245)..(245): n is a, c, g, or t
  misc_feature (254)..(255): n is a, c, g, or t
  misc_feature (263)..(264): n is a, c, g, or t
  misc_feature (298)..(299): n is a, c, g, or t

SEQ ID NO: 216774 - DNA, 568 bp, Canis familiaris; identical to SEQ ID NO: 6667

SEQ ID NO: 216775 - DNA, 619 bp, Canis familiaris; identical to SEQ ID NO: 6668

SEQ ID NO: 216776 - DNA, 626 bp, Canis familiaris; identical to SEQ ID NO: 6669

SEQ ID NO: 216777 - DNA, 562 bp, Canis familiaris; identical to SEQ ID NO: 6670

SEQ ID NO: 216778 - DNA, 665 bp, Canis familiaris; identical to SEQ ID NO: 6671

SEQ ID NO: 216779 - DNA, 621 bp, Canis familiaris; identical to SEQ ID NO: 6672

SEQ ID NO: 216780 - DNA, 603 bp, Canis familiaris; identical to SEQ ID NO: 6673

SEQ ID NO: 216781 - DNA, 519 bp, Canis familiaris; identical to SEQ ID NO: 6674

SEQ ID NO: 216782 - DNA, 640 bp, Canis familiaris; identical to SEQ ID NO: 6675

SEQ ID NO: 216783 - DNA, 569 bp, Canis familiaris; identical to SEQ ID NO: 6676

SEQ ID NO: 216784 - DNA, 629 bp, Canis familiaris; identical to SEQ ID NO: 6677

SEQ ID NO: 216785 - DNA, 633 bp, Canis familiaris; identical to SEQ ID NO: 6678

SEQ ID NO: 216786 - DNA, 560 bp, Canis familiaris; identical to SEQ ID NO: 6679

SEQ ID NO: 216787 - DNA, 463 bp, Canis familiaris; identical to SEQ ID NO: 6680

SEQ ID NO: 216788 - DNA, 570 bp, Canis familiaris; identical to SEQ ID NO: 6681

SEQ ID NO: 216789 - DNA, 655 bp, Canis familiaris; identical to SEQ ID NO: 6682

SEQ ID NO: 216790 - DNA, 529 bp, Canis familiaris; identical to SEQ ID NO: 6683

SEQ ID NO: 216791 - DNA, 486 bp, Canis familiaris; identical to SEQ ID NO: 6684
  misc_feature (1)..(1): n is a, c, g, or t

SEQ ID NO: 216792 - DNA, 471 bp, Canis familiaris; identical to SEQ ID NO: 6685
  misc_feature (1)..(1): n is a, c, g, or t

SEQ ID NO: 216793 - DNA, 556 bp, Canis familiaris; identical to SEQ ID NO: 6686

SEQ ID NO: 216794 - DNA, 602 bp, Canis familiaris; identical to SEQ ID NO: 6687

SEQ ID NO: 216795 - DNA, 506 bp, Canis familiaris; identical to SEQ ID NO: 6688

SEQ ID NO: 216796 - DNA, 561 bp, Canis familiaris; identical to SEQ ID NO: 6689

SEQ ID NO: 216797 - DNA, 680 bp, Canis familiaris; identical to SEQ ID NO: 6690

SEQ ID NO: 216798 - DNA, 484 bp, Canis familiaris; identical to SEQ ID NO: 6691

SEQ ID NO: 216799 - DNA, 495 bp, Canis familiaris; identical to SEQ ID NO: 6692

SEQ ID NO: 216800 - DNA, 553 bp, Canis familiaris; identical to SEQ ID NO: 6693

SEQ ID NO: 216801 - DNA, 641 bp, Canis familiaris; identical to SEQ ID NO: 6694

SEQ ID NO: 216802 - DNA, 406 bp, Canis familiaris; identical to SEQ ID NO: 6695

SEQ ID NO: 216803 - DNA, 629 bp, Canis familiaris; identical to SEQ ID NO: 6696

SEQ ID NO: 216804 - DNA, 624 bp, Canis familiaris; identical to SEQ ID NO: 6697

SEQ ID NO: 216805 - DNA, 610 bp, Canis familiaris; identical to SEQ ID NO: 6698

SEQ ID NO: 216806 - DNA, 636 bp, Canis familiaris; identical to SEQ ID NO: 6699
  misc_feature (187)..(187): n is a, c, g, or t
  misc_feature (320)..(320): n is a, c, g, or t

SEQ ID NO: 216807 - DNA, 553 bp, Canis familiaris; identical to SEQ ID NO: 6700

SEQ ID NO: 216808 - DNA, 596 bp, Canis familiaris; identical to SEQ ID NO: 6701

SEQ ID NO: 216809 - DNA, 619 bp, Canis familiaris; identical to SEQ ID NO: 6702

SEQ ID NO: 216810 - DNA, 597 bp, Canis familiaris; identical to SEQ ID NO: 6703

SEQ ID NO: 216811 - DNA, 464 bp, Canis familiaris; identical to SEQ ID NO: 6704

SEQ ID NO: 216812 - DNA, 593 bp, Canis familiaris; identical to SEQ ID NO: 6705

SEQ ID NO: 216813 - DNA, 116 bp, Canis familiaris; identical to SEQ ID NO: 6706

SEQ ID NO: 216814 - DNA, 521 bp, Canis familiaris; identical to SEQ ID NO: 6707

SEQ ID NO: 216815 - DNA, 482 bp, Canis familiaris; identical to SEQ ID NO: 6708

SEQ ID NO: 216816 - DNA, 484 bp, Canis familiaris; identical to SEQ ID NO: 6709

SEQ ID NO: 216817 - DNA, 534 bp, Canis familiaris; identical to SEQ ID NO: 6710

SEQ ID NO: 216818 - DNA, 532 bp, Canis familiaris; identical to SEQ ID NO: 6711
  misc_feature (1)..(1): n is a, c, g, or t
  misc_feature (75)..(75): n is a, c, g, or t
  misc_feature (246)..(246): n is a, c, g, or t

SEQ ID NO: 216819 - DNA, 385 bp, Canis familiaris; identical to SEQ ID NO: 6712

SEQ ID NO: 216820 - DNA, 454 bp, Canis familiaris; identical to SEQ ID NO: 6713

SEQ ID NO: 216821 - DNA, 534 bp, Canis familiaris; identical to SEQ ID NO: 6714

SEQ ID NO: 216822 - DNA, 552 bp, Canis familiaris; identical to SEQ ID NO: 6715

SEQ ID NO: 216823 - DNA, 579 bp, Canis familiaris; identical to SEQ ID NO: 6716

SEQ ID NO: 216824 - DNA, 617 bp, Canis familiaris; identical to SEQ ID NO: 6717

SEQ ID NO: 216825 - DNA, 567 bp, Canis familiaris; identical to SEQ ID NO: 6718

SEQ ID NO: 216826 - DNA, 577 bp, Canis familiaris; identical to SEQ ID NO: 6719

SEQ ID NO: 216827 - DNA, 590 bp, Canis familiaris; identical to SEQ ID NO: 6720

SEQ ID NO: 216828 - DNA, 569 bp, Canis familiaris; identical to SEQ ID NO: 6721

SEQ ID NO: 216829 - DNA, 584 bp, Canis familiaris; identical to SEQ ID NO: 6722

SEQ ID NO: 216830 - DNA, 596 bp, Canis familiaris; identical to SEQ ID NO: 6723

SEQ ID NO: 216831 - DNA, 632 bp, Canis familiaris; identical to SEQ ID NO: 6724

SEQ ID NO: 216832 - DNA, 626 bp, Canis familiaris; identical to SEQ ID NO: 6725

SEQ ID NO: 216833 - DNA, 647 bp, Canis familiaris; identical to SEQ ID NO: 6726
  misc_feature (105)..(105): n is a, c, g, or t

SEQ ID NO: 216834 - DNA, 547 bp, Canis familiaris; identical to SEQ ID NO: 6727

SEQ ID NO: 216835 - DNA, 675 bp, Canis familiaris; identical to SEQ ID NO: 6728

SEQ ID NO: 216836 - DNA, 586 bp, Canis familiaris; identical to SEQ ID NO: 6729

SEQ ID NO: 216837 - DNA, 603 bp, Canis familiaris; identical to SEQ ID NO: 6730

SEQ ID NO: 216838 - DNA, 409 bp, Canis familiaris; identical to SEQ ID NO: 6731

SEQ ID NO: 216839 - DNA, 681 bp, Canis familiaris; identical to SEQ ID NO: 6732

SEQ ID NO: 216840 - DNA, 333 bp, Canis familiaris; identical to SEQ ID NO: 6733

SEQ ID NO: 216841 - DNA, 669 bp, Canis familiaris; identical to SEQ ID NO: 6734

SEQ ID NO: 216842 - DNA, 577 bp, Canis familiaris; identical to SEQ ID NO: 6735
  misc_feature (88)..(88): n is a, c, g, or t

SEQ ID NO: 216843 - DNA, 597 bp, Canis familiaris; identical to SEQ ID NO: 6736
  misc_feature (132)..(132): n is a, c, g, or t
  misc_feature (218)..(218): n is a, c, g, or t

SEQ ID NO: 216844 - DNA, 381 bp, Canis familiaris; identical to SEQ ID NO: 6737
  misc_feature (1)..(1): n is a, c, g, or t

SEQ ID NO: 216845 - DNA, 644 bp, Canis familiaris; identical to SEQ ID NO: 6738

SEQ ID NO: 216846 - DNA, 673 bp, Canis familiaris; identical to SEQ ID NO: 6739
  misc_feature (428)..(428): n is a, c, g, or t

SEQ ID NO: 216847 - DNA, 616 bp, Canis familiaris; identical to SEQ ID NO: 6740

SEQ ID NO: 216848 - DNA, 630 bp, Canis familiaris; identical to SEQ ID NO: 6741

SEQ ID NO: 216849 - DNA, 637 bp, Canis familiaris; identical to SEQ ID NO: 6742
  misc_feature (1)..(1): n is a, c, g, or t
  misc_feature (367)..(367): n is a, c, g, or t

SEQ ID NO: 216850 - DNA, 586 bp, Canis familiaris; identical to SEQ ID NO: 6743

SEQ ID NO: 216851 - DNA, 585 bp, Canis familiaris; identical to SEQ ID NO: 6744

SEQ ID NO: 216852 - DNA, 617 bp, Canis familiaris; identical to SEQ ID NO: 6745

SEQ ID NO: 216853 - DNA, 632 bp, Canis familiaris; identical to SEQ ID NO: 6746

SEQ ID NO: 216854 - DNA, 598 bp, Canis familiaris; identical to SEQ ID NO: 6747

SEQ ID NO: 216855 - DNA, 519 bp, Canis familiaris; identical to SEQ ID NO: 6748

SEQ ID NO: 216856 - DNA, 631 bp, Canis familiaris; identical to SEQ ID NO: 6749

SEQ ID NO: 216857 - DNA, 651 bp, Canis familiaris; identical to SEQ ID NO: 6750

SEQ ID NO: 216858 - DNA, 594 bp, Canis familiaris; identical to SEQ ID NO: 6751

SEQ ID NO: 216859 - DNA, 597 bp, Canis familiaris; identical to SEQ ID NO: 6752

SEQ ID NO: 216860 - DNA, 597 bp, Canis familiaris; identical to SEQ ID NO: 6753

SEQ ID NO: 216861 - DNA, 616 bp, Canis familiaris; identical to SEQ ID NO: 6754

SEQ ID NO: 216862 - DNA, 571 bp, Canis familiaris; identical to SEQ ID NO: 6755

SEQ ID NO: 216863 - DNA, 675 bp, Canis familiaris; identical to SEQ ID NO: 6756

SEQ ID NO: 216864 - DNA, 656 bp, Canis familiaris; identical to SEQ ID NO: 6757

SEQ ID NO: 216865 - DNA, 625 bp, Canis familiaris; identical to SEQ ID NO: 6758

SEQ ID NO: 216866 - DNA, 616 bp, Canis familiaris; identical to SEQ ID NO: 6759

SEQ ID NO: 216867 - DNA, 675 bp, Canis familiaris; identical to SEQ ID NO: 6760

SEQ ID NO: 216868 - DNA, 619 bp, Canis familiaris; identical to SEQ ID NO: 6761

SEQ ID NO: 216869 - DNA, 608 bp, Canis familiaris; identical to SEQ ID NO: 6762

SEQ ID NO: 216870 - DNA, 637 bp, Canis familiaris; identical to SEQ ID NO: 6763

SEQ ID NO: 216871 - DNA, 616 bp, Canis familiaris; identical to SEQ ID NO: 6764
  misc_feature (1)..(1): n is a, c, g, or t

SEQ ID NO: 216872 - DNA, 560 bp, Canis familiaris; identical to SEQ ID NO: 6765

SEQ ID NO: 216873 - DNA, 563 bp, Canis familiaris; identical to SEQ ID NO: 6766

SEQ ID NO: 216874 - DNA, 535 bp, Canis familiaris; identical to SEQ ID NO: 6767
  misc_feature (1)..(1): n is a, c, g, or t
  misc_feature (247)..(247): n is a, c, g, or t

SEQ ID NO: 216875 - DNA, 603 bp, Canis familiaris; identical to SEQ ID NO: 6768

SEQ ID NO: 216876 - DNA, 534 bp, Canis familiaris; identical to SEQ ID NO: 6769

SEQ ID NO: 216877 - DNA, 603 bp, Canis familiaris; identical to SEQ ID NO: 6770

SEQ ID NO: 216878 - DNA, 602 bp, Canis familiaris; identical to SEQ ID NO: 6771

SEQ ID NO: 216879 - DNA, 558 bp, Canis familiaris; identical to SEQ ID NO: 6772

SEQ ID NO: 216880 - DNA, 632 bp, Canis familiaris; identical to SEQ ID NO: 6773

SEQ ID NO: 216881 - DNA, 633 bp, Canis familiaris; identical to SEQ ID NO: 6774

SEQ ID NO: 216882 - DNA, 651 bp, Canis familiaris; identical to SEQ ID NO: 6775

SEQ ID NO: 216883 - DNA, 364 bp, Canis familiaris; identical to SEQ ID NO: 6776

SEQ ID NO: 216884 - DNA, 606 bp, Canis familiaris; identical to SEQ ID NO: 6777

SEQ ID NO: 216885 - DNA, 362 bp, Canis familiaris; identical to SEQ ID NO: 6778

SEQ ID NO: 216886 - DNA, 665 bp, Canis familiaris; identical to SEQ ID NO: 6779

SEQ ID NO: 216887 - DNA, 635 bp, Canis familiaris; identical to SEQ ID NO: 6780

SEQ ID NO: 216888 - DNA, 618 bp, Canis familiaris; identical to SEQ ID NO: 6781

SEQ ID NO: 216889 - DNA, 635 bp, Canis familiaris; identical to SEQ ID NO: 6782

SEQ ID NO: 216890 - DNA, 417 bp, Canis familiaris; identical to SEQ ID NO: 6783

SEQ ID NO: 216891 - DNA, 639 bp, Canis familiaris; identical to SEQ ID NO: 6784

SEQ ID NO: 216892 - DNA, 661 bp, Canis familiaris; identical to SEQ ID NO: 6785

SEQ ID NO: 216893 - DNA, 605 bp, Canis familiaris; identical to SEQ ID NO: 6786

SEQ ID NO: 216894 - DNA, 554 bp, Canis familiaris; identical to SEQ ID NO: 6787

SEQ ID NO: 216895 - DNA, 649 bp, Canis familiaris; identical to SEQ ID NO: 6788

SEQ ID NO: 216896 - DNA, 622 bp, Canis familiaris; identical to SEQ ID NO: 6789

SEQ ID NO: 216897 - DNA, 626 bp, Canis familiaris; identical to SEQ ID NO: 6790

SEQ ID NO: 216898 - DNA, 539 bp, Canis familiaris; identical to SEQ ID NO: 6791
  misc_feature (72)..(72): n is a, c, g, or t

SEQ ID NO: 216899 - DNA, 650 bp, Canis familiaris; identical to SEQ ID NO: 6792
  misc_feature (203)..(204): n is a, c, g, or t
  misc_feature (226)..(227): n is a, c, g, or t
  misc_feature (304)..(304): n is a, c, g, or t

SEQ ID NO: 216900 - DNA, 540 bp, Canis familiaris; identical to SEQ ID NO: 6793

SEQ ID NO: 216901 - DNA, 641 bp, Canis familiaris; identical to SEQ ID NO: 6794

SEQ ID NO: 216902 - DNA, 606 bp, Canis familiaris; identical to SEQ ID NO: 6795

SEQ ID NO: 216903 - DNA, 672 bp, Canis familiaris; identical to SEQ ID NO: 6796

SEQ ID NO: 216904 - DNA, 638 bp, Canis familiaris; identical to SEQ ID NO: 6797

SEQ ID NO: 216905 - DNA, 618 bp, Canis familiaris; identical to SEQ ID NO: 6798

SEQ ID NO: 216906 - DNA, 558 bp, Canis familiaris; identical to SEQ ID NO: 6799
  misc_feature (1)..(1): n is a, c, g, or t
  misc_feature (147)..(147): n is a, c, g, or t

SEQ ID NO: 216907 - DNA, 663 bp, Canis familiaris; identical to SEQ ID NO: 6800
  misc_feature (132)..(133): n is a, c, g, or t
  misc_feature (238)..(238): n is a, c, g, or t
  misc_feature (278)..(278): n is a, c, g, or t

SEQ ID NO: 216908 - DNA, 603 bp, Canis familiaris; identical to SEQ ID NO: 6801
  misc_feature (1)..(1): n is a, c, g, or t

SEQ ID NO: 216909 - DNA, 604 bp, Canis familiaris; identical to SEQ ID NO: 6802
  misc_feature (539)..(539): n is a, c, g, or t

SEQ ID NO: 216910 - DNA, 608 bp, Canis familiaris; identical to SEQ ID NO: 6803
  misc_feature (225)..(225): n is a, c, g, or t

SEQ ID NO: 216911 - DNA, 711 bp, Canis familiaris; identical to SEQ ID NO: 6804

SEQ ID NO: 216912 - DNA, 534 bp, Canis familiaris; identical to SEQ ID NO: 6805

SEQ ID NO: 216913 - DNA, 621 bp, Canis familiaris; identical to SEQ ID NO: 6806

SEQ ID NO: 216914 - DNA, 604 bp, Canis familiaris; identical to SEQ ID NO: 6807

SEQ ID NO: 216915 - DNA, 472 bp, Canis familiaris; identical to SEQ ID NO: 6808

SEQ ID NO: 216916 - DNA, 625 bp, Canis familiaris; identical to SEQ ID NO: 6809

SEQ ID NO: 216917 - DNA, 611 bp, Canis familiaris; identical to SEQ ID NO: 6810

SEQ ID NO: 216918 - DNA, 579 bp, Canis familiaris; identical to SEQ ID NO: 6811

SEQ ID NO: 216919 - DNA, 685 bp, Canis familiaris; identical to SEQ ID NO: 6812
  misc_feature (1)..(1): n is a, c, g, or t

SEQ ID NO: 216920 - DNA, 597 bp, Canis familiaris; identical to SEQ ID NO: 6813
  misc_feature (1)..(1): n is a, c, g, or t

SEQ ID NO: 216921 - DNA, 619 bp, Canis familiaris; identical to SEQ ID NO: 6814

SEQ ID NO: 216922 - DNA, 406 bp, Canis familiaris; identical to SEQ ID NO: 6815

SEQ ID NO: 216923 - DNA, 651 bp, Canis familiaris; identical to SEQ ID NO: 6816
  misc_feature (313)..(313): n is a, c, g, or t
  misc_feature (355)..(355): n is a, c, g, or t

SEQ ID NO: 216924 - DNA, 571 bp, Canis familiaris; identical to SEQ ID NO: 6817

SEQ ID NO: 216925 - DNA, 541 bp, Canis familiaris; identical to SEQ ID NO: 6818

SEQ ID NO: 216926 - DNA, 244 bp, Canis familiaris; identical to SEQ ID NO: 6819

SEQ ID NO: 216927 - DNA, 689 bp, Canis familiaris; identical to SEQ ID NO: 6820

SEQ ID NO: 216928 - DNA, 534 bp, Canis familiaris; identical to SEQ ID NO: 6821

SEQ ID NO: 216929 - DNA, 653 bp, Canis familiaris; identical to SEQ ID NO: 6822

SEQ ID NO: 216930 - DNA, 556 bp, Canis familiaris; identical to SEQ ID NO: 6823

SEQ ID NO: 216931 - DNA, 593 bp, Canis familiaris; identical to SEQ ID NO: 6824

SEQ ID NO: 216932 - DNA, 728 bp, Canis familiaris; identical to SEQ ID NO: 6825

SEQ ID NO: 216933 - DNA, 569 bp, Canis familiaris; identical to SEQ ID NO: 6826

SEQ ID NO: 216934 - DNA, 591 bp, Canis familiaris; identical to SEQ ID NO: 6827

SEQ ID NO: 216935 - DNA, 682 bp, Canis familiaris; identical to SEQ ID NO: 6828

SEQ ID NO: 216936 - DNA, 585 bp, Canis familiaris; identical to SEQ ID NO: 6829

SEQ ID NO: 216937 - DNA, 624 bp, Canis familiaris; identical to SEQ ID NO: 6830

SEQ ID NO: 216938 - DNA, 643 bp, Canis familiaris; identical to SEQ ID NO: 6831
  misc_feature (147)..(147): n is a, c, g, or t

SEQ ID NO: 216939 - DNA, 165 bp, Canis familiaris; identical to SEQ ID NO: 6832

SEQ ID NO: 216940 - DNA, 491 bp, Canis familiaris; identical to SEQ ID NO: 6833

SEQ ID NO: 216941 - DNA, 627 bp, Canis familiaris; identical to SEQ ID NO: 6834

SEQ ID NO: 216942 - DNA, 666 bp, Canis familiaris; identical to SEQ ID NO: 6835

SEQ ID NO: 216943 - DNA, 522 bp, Canis familiaris; identical to SEQ ID NO: 6836

SEQ ID NO: 216944 - DNA, 577 bp, Canis familiaris; identical to SEQ ID NO: 6837

SEQ ID NO: 216945 - DNA, 595 bp, Canis familiaris; identical to SEQ ID NO: 6838

SEQ ID NO: 216946 - DNA, 598 bp, Canis familiaris; identical to SEQ ID NO: 6839

SEQ ID NO: 216947 - DNA, 660 bp, Canis familiaris; identical to SEQ ID NO: 6840

SEQ ID NO: 216948 - DNA, 551 bp, Canis familiaris; identical to SEQ ID NO: 6841

SEQ ID NO: 216949 - DNA, 403 bp, Canis familiaris; identical to SEQ ID NO: 6842

SEQ ID NO: 216950 - DNA, 615 bp, Canis familiaris; identical to SEQ ID NO: 6843

SEQ ID NO: 216951 - DNA, 671 bp, Canis familiaris; identical to SEQ ID NO: 6844
  misc_feature (472)..(472): n is a, c, g, or t

SEQ ID NO: 216952 - DNA, 514 bp, Canis familiaris; identical to SEQ ID NO: 6845

SEQ ID NO: 216953 - DNA, 654 bp, Canis familiaris; identical to SEQ ID NO: 6846

SEQ ID NO: 216954 - DNA, 633 bp, Canis familiaris; identical to SEQ ID NO: 6847
  misc_feature (108)..(108): n is a, c, g, or t

SEQ ID NO: 216955 - DNA, 674 bp, Canis familiaris; identical to SEQ ID NO: 6848

SEQ ID NO: 216956 - DNA, 634 bp, Canis familiaris; identical to SEQ ID NO: 6849

SEQ ID NO: 216957 - DNA, 507 bp, Canis familiaris; identical to SEQ ID NO: 6850

SEQ ID NO: 216958 - DNA, 552 bp, Canis familiaris; identical to SEQ ID NO: 6851

SEQ ID NO: 216959 - DNA, 611 bp, Canis familiaris; identical to SEQ ID NO: 6852

SEQ ID NO: 216960 - DNA, 652 bp, Canis familiaris; identical to SEQ ID NO: 6853

SEQ ID NO: 216961 - DNA, 664 bp, Canis familiaris; identical to SEQ ID NO: 6854
  misc_feature (1)..(1): n is a, c, g, or t

SEQ ID NO: 216962 - DNA, 641 bp, Canis familiaris; identical to SEQ ID NO: 6855

SEQ ID NO: 216963 - DNA, 641 bp, Canis familiaris; identical to SEQ ID NO: 6856

SEQ ID NO: 216964 - DNA, 686 bp, Canis familiaris; identical to SEQ ID NO: 6857

SEQ ID NO: 216965 - DNA, 649 bp, Canis familiaris; identical to SEQ ID NO: 6858
  misc_feature (93)..(93): n is a, c, g, or t

SEQ ID NO: 216966 - DNA, 641 bp, Canis familiaris; identical to SEQ ID NO: 6859

SEQ ID NO: 216967 - DNA, 640 bp, Canis familiaris; identical to SEQ ID NO: 6860

SEQ ID NO: 216968 - DNA, 590 bp, Canis familiaris; identical to SEQ ID NO: 6861

SEQ ID NO: 216969 - DNA, 661 bp, Canis familiaris; identical to SEQ ID NO: 6862
  misc_feature (41)..(41): n is a, c, g, or t

SEQ ID NO: 216970 - DNA, 477 bp, Canis familiaris; identical to SEQ ID NO: 6863
  misc_feature (1)..(1): n is a, c, g, or t

SEQ ID NO: 216971 - DNA, 687 bp, Canis familiaris; identical to SEQ ID NO: 6864
  misc_feature (1)..(1): n is a, c, g, or t

SEQ ID NO: 216972 - DNA, 592 bp, Canis familiaris; identical to SEQ ID NO: 6865

SEQ ID NO: 216973 - DNA, 617 bp, Canis familiaris; identical to SEQ ID NO: 6866

SEQ ID NO: 216974 - DNA, 677 bp, Canis familiaris; identical to SEQ ID NO: 6867

SEQ ID NO: 216975 - DNA, 314 bp, Canis familiaris; identical to SEQ ID NO: 6868
  misc_feature (1)..(1): n is a, c, g, or t

SEQ ID NO: 216976 - DNA, 619 bp, Canis familiaris; identical to SEQ ID NO: 6869

SEQ ID NO: 216977 - DNA, 624 bp, Canis familiaris; identical to SEQ ID NO: 6870
  misc_feature (16)..(16): n is a, c, g, or t

SEQ ID NO: 216978 - DNA, 702 bp, Canis familiaris; identical to SEQ ID NO: 6871
  misc_feature (94)..(94): n is a, c, g, or t

SEQ ID NO: 216979 - DNA, 631 bp, Canis familiaris; identical to SEQ ID NO: 6872

SEQ ID NO: 216980 - DNA, 735 bp, Canis familiaris; identical to SEQ ID NO: 6873

SEQ ID NO: 216981 - DNA, 655 bp, Canis familiaris; identical to SEQ ID NO: 6874
  misc_feature (34)..(34): n is a, c, g, or t

SEQ ID NO: 216982 - DNA, 632 bp, Canis familiaris; identical to SEQ ID NO: 6875

SEQ ID NO: 216983 - DNA, 665 bp, Canis familiaris; identical to SEQ ID NO: 6876
  misc_feature (67)..(67): n is a, c, g, or t

SEQ ID NO: 216984 - DNA, 646 bp, Canis familiaris; identical to SEQ ID NO: 6877

SEQ ID NO: 216985 - DNA, 463 bp, Canis familiaris; identical to SEQ ID NO: 6878

SEQ ID NO: 216986 - DNA, 632 bp, Canis familiaris; identical to SEQ ID NO: 6879

SEQ ID NO: 216987 - DNA, 644 bp, Canis familiaris; identical to SEQ ID NO: 6880

SEQ ID NO: 216988 - DNA, 679 bp, Canis familiaris; identical to SEQ ID NO: 6881

SEQ ID NO: 216989 - DNA, 610 bp, Canis familiaris; identical to SEQ ID NO: 6882

SEQ ID NO: 216990 - DNA, 644 bp, Canis familiaris; identical to SEQ ID NO: 6883
  misc_feature (30)..(30): n is a, c, g, or t

SEQ ID NO: 216991 - DNA, 722 bp, Canis familiaris; identical to SEQ ID NO: 6884
  misc_feature (52)..(52): n is a, c, g, or t

SEQ ID NO: 216992 - DNA, 393 bp, Canis familiaris; identical to SEQ ID NO: 6885

SEQ ID NO: 216993 - DNA, 664 bp, Canis familiaris; identical to SEQ ID NO: 6886

SEQ ID NO: 216994 - DNA, 632 bp, Canis familiaris; identical to SEQ ID NO: 6887

SEQ ID NO: 216995 - DNA, 597 bp, Canis familiaris; identical to SEQ ID NO: 6888

SEQ ID NO: 216996 - DNA, 414 bp, Canis familiaris; identical to SEQ ID NO: 6889

SEQ ID NO: 216997 - DNA, 397 bp, Canis familiaris; identical to SEQ ID NO: 6890

SEQ ID NO: 216998 - DNA, 490 bp, Canis familiaris; identical to SEQ ID NO: 6891
  misc_feature (99)..(99): n is a, c, g, or t
  misc_feature (116)..(116): n is a, c, g, or t
  misc_feature (148)..(148): n is a, c, g, or t
  misc_feature (163)..(163): n is a, c, g, or t

SEQ ID NO: 216999 - DNA, 559 bp, Canis familiaris; identical to SEQ ID NO: 6892

SEQ ID NO: 217000 - DNA, 333 bp, Canis familiaris; identical to SEQ ID NO: 6893

SEQ ID NO: 217001 - DNA, 577 bp, Canis familiaris; identical to SEQ ID NO: 6894

SEQ ID NO: 217002 - DNA, 610 bp, Canis familiaris; identical to SEQ ID NO: 6895

SEQ ID NO: 217003 - DNA, 617 bp, Canis familiaris; identical to SEQ ID NO: 6896
  misc_feature (116)..(116): n is a, c, g, or t

SEQ ID NO: 217004 - DNA, 451 bp, Canis familiaris; identical to SEQ ID NO: 6897

SEQ ID NO: 217005 - DNA, 429 bp, Canis familiaris; identical to SEQ ID NO: 6898

SEQ ID NO: 217006 - DNA, 453 bp, Canis familiaris; identical to SEQ ID NO: 6899

SEQ ID NO: 217007 - DNA, 603 bp, Canis familiaris; identical to SEQ ID NO: 6900

SEQ ID NO: 217008 - DNA, 327 bp, Canis familiaris; identical to SEQ ID NO: 6901
  misc_feature (35)..(35): n is a, c, g, or t
  misc_feature (143)..(143): n is a, c, g, or t

SEQ ID NO: 217009 - DNA, 418 bp, Canis familiaris; identical to SEQ ID NO: 6902

SEQ ID NO: 217010 - DNA, 603 bp, Canis familiaris; identical to SEQ ID NO: 6903

SEQ ID NO: 217011 - DNA, 468 bp, Canis familiaris; identical to SEQ ID NO: 6904
  misc_feature (1)..(1): n is a, c, g, or t

SEQ ID NO: 217012 - DNA, 472 bp, Canis familiaris; identical to SEQ ID NO: 6905

SEQ ID NO: 217013 - DNA, 602 bp, Canis familiaris; identical to SEQ ID NO: 6906

SEQ ID NO: 217014 - DNA, 151 bp, Canis familiaris; identical to SEQ ID NO: 6907

SEQ ID NO: 217015 - DNA, 637 bp, Canis familiaris; identical to SEQ ID NO: 6908

SEQ ID NO: 217016 - DNA, 394 bp, Canis familiaris; identical to SEQ ID NO: 6909

SEQ ID NO: 217017 - DNA, 623 bp, Canis familiaris; identical to SEQ ID NO: 6910
  misc_feature (1)..(1): n is a, c, g, or t

SEQ ID NO: 217018 - DNA, 592 bp, Canis familiaris; identical to SEQ ID NO: 6911
  misc_feature (1)..(1): n is a, c, g, or t

SEQ ID NO: 217019 - DNA, 643 bp, Canis familiaris; identical to SEQ ID NO: 6912

SEQ ID NO: 217020 - DNA, 644 bp, Canis familiaris; identical to SEQ ID NO: 6913

SEQ ID NO: 217021 - DNA, 704 bp, Canis familiaris; identical to SEQ ID NO: 6914

SEQ ID NO: 217022 - DNA, 629 bp, Canis familiaris; identical to SEQ ID NO: 6915

SEQ ID NO: 217023 - DNA, 598 bp, Canis familiaris; identical to SEQ ID NO: 6916
  misc_feature (1)..(1): n is a, c, g, or t

SEQ ID NO: 217024 - DNA, 516 bp, Canis familiaris; identical to SEQ ID NO: 6917

SEQ ID NO: 217025 - DNA, 451 bp, Canis familiaris; identical to SEQ ID NO: 6918

SEQ ID NO: 217026 - DNA, 751 bp, Canis familiaris; identical to SEQ ID NO: 6919
  misc_feature (1)..(1): n is a, c, g, or t
  misc_feature (209)..(209): n is a, c, g, or t

SEQ ID NO: 217027 - DNA, 673 bp, Canis familiaris; identical to SEQ ID NO: 6920

SEQ ID NO: 217028 - DNA, 631 bp, Canis familiaris; identical to SEQ ID NO: 6921

SEQ ID NO: 217029 - DNA, 615 bp, Canis familiaris; identical to SEQ ID NO: 6922

SEQ ID NO: 217030 - DNA, 639 bp, Canis familiaris; identical to SEQ ID NO: 6923

SEQ ID NO: 217031 - DNA, 599 bp, Canis familiaris; identical to SEQ ID NO: 6924

SEQ ID NO: 217032 - DNA, 615 bp, Canis familiaris; identical to SEQ ID NO: 6925

SEQ ID NO: 217033 - DNA, 546 bp, Canis familiaris; identical to SEQ ID NO: 6926
  misc_feature (335)..(335): n is a, c, g, or t

SEQ ID NO: 217034 - DNA, 726 bp, Canis familiaris; identical to SEQ ID NO: 6927

SEQ ID NO: 217035 - DNA, 612 bp, Canis familiaris; identical to SEQ ID NO: 6928

SEQ ID NO: 217036 - DNA, 636 bp, Canis familiaris; identical to SEQ ID NO: 6929

SEQ ID NO: 217037 - DNA, 617 bp, Canis familiaris; identical to SEQ ID NO: 6930

SEQ ID NO: 217038 - DNA, 481 bp, Canis familiaris; identical to SEQ ID NO: 6931

SEQ ID NO: 217039 - DNA, 539 bp, Canis familiaris; identical to SEQ ID NO: 6932

SEQ ID NO: 217040 - DNA, 495 bp, Canis familiaris; identical to SEQ ID NO: 6933
  misc_feature (26)..(26): n is a, c, g, or t
  misc_feature (43)..(43): n is a, c, g, or t
  misc_feature (65)..(65): n is a, c, g, or t
  misc_feature (78)..(78): n is a, c, g, or t

SEQ ID NO: 217041 - DNA, 624 bp, Canis familiaris; identical to SEQ ID NO: 6934

SEQ ID NO: 217042 - DNA, 497 bp, Canis familiaris; identical to SEQ ID NO: 6935

SEQ ID NO: 217043 - DNA, 570 bp, Canis familiaris; identical to SEQ ID NO: 6936
  misc_feature (229)..(229): n is a, c, g, or t

SEQ ID NO: 217044 - DNA, 759 bp, Canis familiaris; identical to SEQ ID NO: 6937
  misc_feature (368)..(368): n is a, c, g, or t

SEQ ID NO: 217045 - DNA, 642 bp, Canis familiaris; identical to SEQ ID NO: 6938

SEQ ID NO: 217046 - DNA, 472 bp, Canis familiaris; identical to SEQ ID NO: 6939

SEQ ID NO: 217047 - DNA, 571 bp, Canis familiaris; identical to SEQ ID NO: 6940
  misc_feature (64)..(64): n is a, c, g, or t

SEQ ID NO: 217048 - DNA, 609 bp, Canis familiaris; identical to SEQ ID NO: 6941
  misc_feature (164)..(164): n is a, c, g, or t

SEQ ID NO: 217049 - DNA, 558 bp, Canis familiaris; identical to SEQ ID NO: 6942

SEQ ID NO: 217050 - DNA, 699 bp, Canis familiaris; identical to SEQ ID NO: 6943
  misc_feature (204)..(204): n is a, c, g, or t

SEQ ID NO: 217051 - DNA, 616 bp, Canis familiaris; identical to SEQ ID NO: 6944

SEQ ID NO: 217052 - DNA, 642 bp, Canis familiaris; identical to SEQ ID NO: 6945

SEQ ID NO: 217053 - DNA, 582 bp, Canis familiaris; identical to SEQ ID NO: 6946

SEQ ID NO: 217054 - DNA, 623 bp, Canis familiaris; identical to SEQ ID NO: 6947
  misc_feature (326)..(326): n is a, c, g, or t

SEQ ID NO: 217055 - DNA, 607 bp, Canis familiaris; identical to SEQ ID NO: 6948

SEQ ID NO: 217056 - DNA, 581 bp, Canis familiaris; identical to SEQ ID NO: 6949

SEQ ID NO: 217057 - DNA, 533 bp, Canis familiaris; identical to SEQ ID NO: 6950

SEQ ID NO: 217058 - DNA, 617 bp, Canis familiaris; identical to SEQ ID NO: 6951

SEQ ID NO: 217059 - DNA, 662 bp, Canis familiaris; identical to SEQ ID NO: 6952

SEQ ID NO: 217060 - DNA, 392 bp, Canis familiaris; identical to SEQ ID NO: 6953
  misc_feature (40)..(41): n is a, c, g, or t
  misc_feature (43)..(43): n is a, c, g, or t
  misc_feature (65)..(66): n is a, c, g, or t

SEQ ID NO: 217061 - DNA, 510 bp, Canis familiaris; identical to SEQ ID NO: 6954

SEQ ID NO: 217062 - DNA, 354 bp, Canis familiaris; identical to SEQ ID NO: 6955
  misc_feature (53)..(53): n is a, c, g, or t

SEQ ID NO: 217063 - DNA, 603 bp, Canis familiaris; identical to SEQ ID NO: 6956

SEQ ID NO: 217064 - DNA, 564 bp, Canis familiaris; identical to SEQ ID NO: 6957

SEQ ID NO: 217065 - DNA, 166 bp, Canis familiaris; identical to SEQ ID NO: 6958
  misc_feature (1)..(1): n is a, c, g, or t

SEQ ID NO: 217066 - DNA, 415 bp, Canis familiaris; identical to SEQ ID NO: 6959
  misc_feature (1)..(1): n is a, c, g, or t
  misc_feature (157)..(157): n is a, c, g, or t
  misc_feature (247)..(247): n is a, c, g, or t

SEQ ID NO: 217067 - DNA, 561 bp, Canis familiaris; identical to SEQ ID NO: 6960

SEQ ID NO: 217068 - DNA, 594 bp, Canis familiaris; identical to SEQ ID NO: 6961

SEQ ID NO: 217069 - DNA, 478 bp, Canis familiaris; identical to SEQ ID NO: 6962

SEQ ID NO: 217070 - DNA, 461 bp, Canis familiaris; identical to SEQ ID NO: 6963

SEQ ID NO: 217071 - DNA, 630 bp, Canis familiaris; identical to SEQ ID NO: 6964

SEQ ID NO: 217072 - DNA, 596 bp, Canis familiaris; identical to SEQ ID NO: 6965

SEQ ID NO: 217073 - DNA, 603 bp, Canis familiaris; identical to SEQ ID NO: 6966
  misc_feature (1)..(1): n is a, c, g, or t
  misc_feature (148)..(148): n is a, c, g, or t
  misc_feature (159)..(159): n is a, c, g, or t
  misc_feature (181)..(181): n is a, c, g, or t

SEQ ID NO: 217074 - DNA, 545 bp, Canis familiaris; identical to SEQ ID NO: 6967

SEQ ID NO: 217075 - DNA, 604 bp, Canis familiaris; identical to SEQ ID NO: 6968

SEQ ID NO: 217076 - DNA, 524 bp, Canis familiaris; identical to SEQ ID NO: 6969

SEQ ID NO: 217077 - DNA, 635 bp, Canis familiaris; identical to SEQ ID NO: 6970
  misc_feature (22)..(22): n is a, c, g, or t

SEQ ID NO: 217078 - DNA, 426 bp, Canis familiaris; identical to SEQ ID NO: 6971

SEQ ID NO: 217079 - DNA, 599 bp, Canis familiaris; identical to SEQ ID NO: 6972

SEQ ID NO: 217080 - DNA, 372 bp, Canis familiaris; identical to SEQ ID NO: 6973

SEQ ID NO: 217081 - DNA, 635 bp, Canis familiaris; identical to SEQ ID NO: 6974

SEQ ID NO: 217082 - DNA, 661 bp, Canis familiaris; identical to SEQ ID NO: 6975
  misc_feature (1)..(1): n is a, c, g, or t

SEQ ID NO: 217083 - DNA, 564 bp, Canis familiaris; identical to SEQ ID NO: 6976

SEQ ID NO: 217084 - DNA, 662 bp, Canis familiaris; identical to SEQ ID NO: 6977

SEQ ID NO: 217085 - DNA, 558 bp, Canis familiaris; identical to SEQ ID NO: 6978

SEQ ID NO: 217086 - DNA, 629 bp, Canis familiaris; identical to SEQ ID NO: 6979

SEQ ID NO: 217087 - DNA, 620 bp, Canis familiaris; identical to SEQ ID NO: 6980
  misc_feature (30)..(30): n is a, c, g, or t

SEQ ID NO: 217088 - DNA, 702 bp, Canis familiaris; identical to SEQ ID NO: 6981
  misc_feature (559)..(559): n is a, c, g, or t

SEQ ID NO: 217089 - DNA, 622 bp, Canis familiaris; identical to SEQ ID NO: 6982
  misc_feature (318)..(318): n is a, c, g, or t

SEQ ID NO: 217090 - DNA, 610 bp, Canis familiaris; identical to SEQ ID NO: 6983
  misc_feature (169)..(169): n is a, c, g, or t

SEQ ID NO: 217091 - DNA, 620 bp, Canis familiaris; identical to SEQ ID NO: 6984

SEQ ID NO: 217092 - DNA, 615 bp, Canis familiaris; identical to SEQ ID NO: 6985
  misc_feature (4)..(4): n is a, c, g, or t

SEQ ID NO: 217093 - DNA, 606 bp, Canis familiaris; identical to SEQ ID NO: 6986

SEQ ID NO: 217094 - DNA, 633 bp, Canis familiaris; identical to SEQ ID NO: 6987

SEQ ID NO: 217095 - DNA, 626 bp, Canis familiaris; identical to SEQ ID NO: 6988

SEQ ID NO: 217096 - DNA, 618 bp, Canis familiaris; identical to SEQ ID NO: 6989

SEQ ID NO: 217097 - DNA, 309 bp, Canis familiaris; identical to SEQ ID NO: 6990

SEQ ID NO: 217098 - DNA, 612 bp, Canis familiaris; identical to SEQ ID NO: 6991

SEQ ID NO: 217099 - DNA, 372 bp, Canis familiaris; identical to SEQ ID NO: 6992

SEQ ID NO: 217100 - DNA, 508 bp, Canis familiaris; identical to SEQ ID NO: 6993

SEQ ID NO: 217101 - DNA, 605 bp, Canis familiaris; identical to SEQ ID NO: 6994

SEQ ID NO: 217102 - DNA, 585 bp, Canis familiaris; identical to SEQ ID NO: 6995

SEQ ID NO: 217103 - DNA, 538 bp, Canis familiaris; identical to SEQ ID NO: 6996

SEQ ID NO: 217104 - DNA, 433 bp, Canis familiaris; identical to SEQ ID NO: 6997

SEQ ID NO: 217105 - DNA, 511 bp, Canis familiaris; identical to SEQ ID NO: 6998
  misc_feature (114)..(114): n is a, c, g, or t

SEQ ID NO: 217106 - DNA, 640 bp, Canis familiaris; identical to SEQ ID NO: 6999

SEQ ID NO: 217107 - DNA, 666 bp, Canis familiaris; identical to SEQ ID NO: 7000

SEQ ID NO: 217108 - DNA, 465 bp, Canis familiaris; identical to SEQ ID NO: 7001
  misc_feature (413)..(413): n is a, c, g, or t

SEQ ID NO: 217109 - DNA, 646 bp, Canis familiaris; identical to SEQ ID NO: 7002

SEQ ID NO: 217110 - DNA, 595 bp, Canis familiaris; identical to SEQ ID NO: 7003

SEQ ID NO: 217111 - DNA, 638 bp, Canis familiaris; identical to SEQ ID NO: 7004

SEQ ID NO: 217112 - DNA, 545 bp, Canis familiaris; identical to SEQ ID NO: 7005

SEQ ID NO: 217113 - DNA, 633 bp, Canis familiaris; identical to SEQ ID NO: 7006

SEQ ID NO: 217114 - DNA, 654 bp, Canis familiaris; identical to SEQ ID NO: 7007

SEQ ID NO: 217115 - DNA, 638 bp, Canis familiaris; identical to SEQ ID NO: 7008
  misc_feature (1)..(1): n is a, c, g, or t

SEQ ID NO: 217116 - DNA, 623 bp, Canis familiaris; identical to SEQ ID NO: 7009

SEQ ID NO: 217117 - DNA, 608 bp, Canis familiaris; identical to SEQ ID NO: 7010
  misc_feature (1)..(1): n is a, c, g, or t

SEQ ID NO: 217118 - DNA, 635 bp, Canis familiaris; identical to SEQ ID NO: 7011

SEQ ID NO: 217119 - DNA, 630 bp, Canis familiaris; identical to SEQ ID NO: 7012

SEQ ID NO: 217120 - DNA, 649 bp, Canis familiaris; identical to SEQ ID NO: 7013

SEQ ID NO: 217121 - DNA, 376 bp, Canis familiaris; identical to SEQ ID NO: 7014

SEQ ID NO: 217122 - DNA, 714 bp, Canis familiaris; identical to SEQ ID NO: 7015

SEQ ID NO: 217123 - DNA, 683 bp, Canis familiaris; identical to SEQ ID NO: 7016
  misc_feature (101)..(101): n is a, c, g, or t

SEQ ID NO: 217124 - DNA, 514 bp, Canis familiaris; identical to SEQ ID NO: 7017

SEQ ID NO: 217125 - DNA, 602 bp, Canis familiaris; identical to SEQ ID NO: 7018

SEQ ID NO: 217126 - DNA, 621 bp, Canis familiaris; identical to SEQ ID NO: 7019

SEQ ID NO: 217127 - DNA, 680 bp, Canis familiaris; identical to SEQ ID NO: 7020
  misc_feature (12)..(12): n is a, c, g, or t

SEQ ID NO: 217128 - DNA, 612 bp, Canis familiaris; identical to SEQ ID NO: 7021

SEQ ID NO: 217129 - DNA, 631 bp, Canis familiaris; identical to SEQ ID NO: 7022

SEQ ID NO: 217130 - DNA, 487 bp, Canis familiaris; identical to SEQ ID NO: 7023

SEQ ID NO: 217131 - DNA, 475 bp, Canis familiaris; identical to SEQ ID NO: 7024

SEQ ID NO: 217132 - DNA, 627 bp, Canis familiaris; identical to SEQ ID NO: 7025

SEQ ID NO: 217133 - DNA, 643 bp, Canis familiaris; identical to SEQ ID NO: 7026
  misc_feature (120)..(120): n is a, c, g, or t

SEQ ID NO: 217134 - DNA, 582 bp, Canis familiaris; identical to SEQ ID NO: 7027

SEQ ID NO: 217135 - DNA, 310 bp, Canis familiaris; identical to SEQ ID NO: 7028

SEQ ID NO: 217136 - DNA, 594 bp, Canis familiaris; identical to SEQ ID NO: 7029

SEQ ID NO: 217137 - DNA, 616 bp, Canis familiaris; identical to SEQ ID NO: 7030

SEQ ID NO: 217138 - DNA, 513 bp, Canis familiaris; identical to SEQ ID NO: 7031

SEQ ID NO: 217139 - DNA, 594 bp, Canis familiaris; identical to SEQ ID NO: 7032

SEQ ID NO: 217140 - DNA, 596 bp, Canis familiaris; identical to SEQ ID NO: 7033

SEQ ID NO: 217141 - DNA, 625 bp, Canis familiaris; identical to SEQ ID NO: 7034
  misc_feature (277)..(277): n is a, c, g, or t

SEQ ID NO: 217142 - DNA, 588 bp, Canis familiaris; identical to SEQ ID NO: 7035

SEQ ID NO: 217143 - DNA, 632 bp, Canis familiaris; identical to SEQ ID NO: 7036

SEQ ID NO: 217144 - DNA, 551 bp, Canis familiaris; identical to SEQ ID NO: 7037
  misc_feature (1)..(1): n is a, c, g, or t

SEQ ID NO: 217145 - DNA, 624 bp, Canis familiaris; identical to SEQ ID NO: 7038

SEQ ID NO: 217146 - DNA, 605 bp, Canis familiaris; identical to SEQ ID NO: 7039

SEQ ID NO: 217147 - DNA, 491 bp, Canis familiaris; identical to SEQ ID NO: 7040

SEQ ID NO: 217148 - DNA, 609 bp, Canis familiaris; identical to SEQ ID NO: 7041

SEQ ID NO: 217149 - DNA, 572 bp, Canis familiaris; identical to SEQ ID NO: 7042

SEQ ID NO: 217150 - DNA, 595 bp, Canis familiaris; identical to SEQ ID NO: 7043

SEQ ID NO: 217151 - DNA, 627 bp, Canis familiaris; identical to SEQ ID NO: 7044
  misc_feature (348)..(348): n is a, c, g, or t

SEQ ID NO: 217152 - DNA, 682 bp, Canis familiaris; identical to SEQ ID NO: 7045

SEQ ID NO: 217153 - DNA, 564 bp, Canis familiaris; identical to SEQ ID NO: 7046

SEQ ID NO: 217154 - DNA, 632 bp, Canis familiaris; identical to SEQ ID NO: 7047
  misc_feature (1)..(1): n is a, c, g, or t
  misc_feature (120)..(120): n is a, c, g, or t

SEQ ID NO: 217155 - DNA, 604 bp, Canis familiaris; identical to SEQ ID NO: 7048

SEQ ID NO: 217156 - DNA, 638 bp, Canis familiaris; identical to SEQ ID NO: 7049

SEQ ID NO: 217157 - DNA, 587 bp, Canis familiaris; identical to SEQ ID NO: 7050

SEQ ID NO: 217158 - DNA, 623 bp, Canis familiaris; identical to SEQ ID NO: 7051

SEQ ID NO: 217159 - DNA, 694 bp, Canis familiaris; identical to SEQ ID NO: 7052

SEQ ID NO: 217160 - DNA, 529 bp, Canis familiaris; identical to SEQ ID NO: 7053

SEQ ID NO: 217161 - DNA, 168 bp, Canis familiaris; identical to SEQ ID NO: 7054

SEQ ID NO: 217162 - DNA, 600 bp, Canis familiaris; identical to SEQ ID NO: 7055

SEQ ID NO: 217163 - DNA, 541 bp, Canis familiaris; identical to SEQ ID NO: 7056

SEQ ID NO: 217164 - DNA, 593 bp, Canis familiaris; identical to SEQ ID NO: 7057

SEQ ID NO: 217165 - DNA, 620 bp, Canis familiaris; identical to SEQ ID NO: 7058

SEQ ID NO: 217166 - DNA, 668 bp, Canis familiaris; identical to SEQ ID NO: 7059

SEQ ID NO: 217167 - DNA, 648 bp, Canis familiaris; identical to SEQ ID NO: 7060

SEQ ID NO: 217168 - DNA, 590 bp, Canis familiaris; identical to SEQ ID NO: 7061

SEQ ID NO: 217169 - DNA, 629 bp, Canis familiaris; identical to SEQ ID NO: 7062

SEQ ID NO: 217170 - DNA, 610 bp, Canis familiaris; identical to SEQ ID NO: 7063

SEQ ID NO: 217171 - DNA, 596 bp, Canis familiaris; identical to SEQ ID NO: 7064
  misc_feature (231)..(231): n is a, c, g, or t

SEQ ID NO: 217172 - DNA, 644 bp, Canis familiaris; identical to SEQ ID NO: 7065

SEQ ID NO: 217173 - DNA, 592 bp, Canis familiaris; identical to SEQ ID NO: 7066

SEQ ID NO: 217174 - DNA, 654 bp, Canis familiaris; identical to SEQ ID NO: 7067
  misc_feature (14)..(14): n is a, c, g, or t

SEQ ID NO: 217175 - DNA, 609 bp, Canis familiaris; identical to SEQ ID NO: 7068

SEQ ID NO: 217176 - DNA, 609 bp, Canis familiaris; identical to SEQ ID NO: 7069
  misc_feature (230)..(230): n is a, c, g, or t

SEQ ID NO: 217177 - DNA, 495 bp, Canis familiaris; identical to SEQ ID NO: 7070
  misc_feature (18)..(18): n is a, c, g, or t

SEQ ID NO: 217178 - DNA, 270 bp, Canis familiaris; identical to SEQ ID NO: 7071
  misc_feature (1)..(1): n is a, c, g, or t

SEQ ID NO: 217179 - DNA, 636 bp, Canis familiaris; identical to SEQ ID NO: 7072

SEQ ID NO: 217180 - DNA, 548 bp, Canis familiaris; identical to SEQ ID NO: 7073
  misc_feature (18)..(19): n is a, c, g, or t

SEQ ID NO: 217181 - DNA, 708 bp, Canis familiaris; identical to SEQ ID NO: 7074

SEQ ID NO: 217182 - DNA, 667 bp, Canis familiaris; identical to SEQ ID NO: 7075

SEQ ID NO: 217183 - DNA, 443 bp, Canis familiaris; identical to SEQ ID NO: 7076

SEQ ID NO: 217184 - DNA, 577 bp, Canis familiaris; identical to SEQ ID NO: 7077

SEQ ID NO: 217185 - DNA, 541 bp, Canis familiaris; identical to SEQ ID NO: 7078

SEQ ID NO: 217186 - DNA, 567 bp, Canis familiaris; identical to SEQ ID NO: 7079

SEQ ID NO: 217187 - DNA, 623 bp, Canis familiaris; identical to SEQ ID NO: 7080

SEQ ID NO: 217188 - DNA, 541 bp, Canis familiaris; identical to SEQ ID NO: 7081

SEQ ID NO: 217189 - DNA, 613 bp, Canis familiaris; identical to SEQ ID NO: 7082

SEQ ID NO: 217190 - DNA, 594 bp, Canis familiaris; identical to SEQ ID NO: 7083

SEQ ID NO: 217191 - DNA, 616 bp, Canis familiaris; identical to SEQ ID NO: 7084

SEQ ID NO: 217192 - DNA, 631 bp, Canis familiaris; identical to SEQ ID NO: 7085
  misc_feature (324)..(324): n is a, c, g, or t

SEQ ID NO: 217193 - DNA, 637 bp, Canis familiaris; identical to SEQ ID NO: 7086

SEQ ID NO: 217194 - DNA, 655 bp, Canis familiaris; identical to SEQ ID NO: 7087

SEQ ID NO: 217195 - DNA, 650 bp, Canis familiaris; identical to SEQ ID NO: 7088

SEQ ID NO: 217196 - DNA, 519 bp, Canis familiaris; identical to SEQ ID NO: 7089

SEQ ID NO: 217197 - DNA, 630 bp, Canis familiaris; identical to SEQ ID NO: 7090

SEQ ID NO: 217198 - DNA, 641 bp, Canis familiaris; identical to SEQ ID NO: 7091
  misc_feature (110)..(110): n is a, c, g, or t

SEQ ID NO: 217199 - DNA, 632 bp, Canis familiaris; identical to SEQ ID NO: 7092

SEQ ID NO: 217200 - DNA, 511 bp, Canis familiaris; identical to SEQ ID NO: 7093

SEQ ID NO: 217201 - DNA, 625 bp, Canis familiaris; identical to SEQ ID NO: 7094

SEQ ID NO: 217202 - DNA, 550 bp, Canis familiaris; identical to SEQ ID NO: 7095

SEQ ID NO: 217203 - DNA, 524 bp, Canis familiaris; identical to SEQ ID NO: 7096

SEQ ID NO: 217204 - DNA, 680 bp, Canis familiaris; identical to SEQ ID NO: 7097

SEQ ID NO: 217205 - DNA, 644 bp, Canis familiaris; identical to SEQ ID NO: 7098

SEQ ID NO: 217206 - DNA, 589 bp, Canis familiaris; identical to SEQ ID NO: 7099

SEQ ID NO: 217207 - DNA, 545 bp, Canis familiaris; identical to SEQ ID NO: 7100
  misc_feature (265)..(266): n is a, c, g, or t
  misc_feature (277)..(277): n is a, c, g, or t

SEQ ID NO: 217208 - DNA, 555 bp, Canis familiaris; identical to SEQ ID NO: 7101
  misc_feature (1)..(1): n is a, c, g, or t

SEQ ID NO: 217209 - DNA, 650 bp, Canis familiaris; identical to SEQ ID NO: 7102

SEQ ID NO: 217210 - DNA, 674 bp, Canis familiaris; identical to SEQ ID NO: 7103
  misc_feature (1)..(1): n is a, c, g, or t
  misc_feature (115)..(115): n is a, c, g, or t

SEQ ID NO: 217211 - DNA, 459 bp, Canis familiaris; identical to SEQ ID NO: 7104

SEQ ID NO: 217212 - DNA, 634 bp, Canis familiaris; identical to SEQ ID NO: 7105
  misc_feature (31)..(31): n is a, c, g, or t

SEQ ID NO: 217213 - DNA, 501 bp, Canis familiaris; identical to SEQ ID NO: 7106

SEQ ID NO: 217214 - DNA, 581 bp, Canis familiaris; identical to SEQ ID NO: 7107

SEQ ID NO: 217215 - DNA, 673 bp, Canis familiaris; identical to SEQ ID NO: 7108

SEQ ID NO: 217216 - DNA, 618 bp, Canis familiaris; identical to SEQ ID NO: 7109
  misc_feature (1)..(1): n is a, c, g, or t

SEQ ID NO: 217217 - DNA, 582 bp, Canis familiaris; identical to SEQ ID NO: 7110

SEQ ID NO: 217218 - DNA, 634 bp, Canis familiaris; identical to SEQ ID NO: 7111

SEQ ID NO: 217219 - DNA, 618 bp, Canis familiaris; identical to SEQ ID NO: 7112

SEQ ID NO: 217220 - DNA, 498 bp, Canis familiaris; identical to SEQ ID NO: 7113

SEQ ID NO: 217221 - DNA, 614 bp, Canis familiaris; identical to SEQ ID NO: 7114
  misc_feature (35)..(35): n is a, c, g, or t
  misc_feature (161)..(161): n is a, c, g, or t

SEQ ID NO: 217222 - DNA, 658 bp, Canis familiaris; identical to SEQ ID NO: 7115

SEQ ID NO: 217223 - DNA, 649 bp, Canis familiaris; identical to SEQ ID NO: 7116

SEQ ID NO: 217224 - DNA, 624 bp, Canis familiaris; identical to SEQ ID NO: 7117
  misc_feature (120)..(120): n is a, c, g, or t

SEQ ID NO: 217225 - DNA, 461 bp, Canis familiaris; identical to SEQ ID NO: 7118

SEQ ID NO: 217226 - DNA, 568 bp, Canis familiaris; identical to SEQ ID NO: 7119

SEQ ID NO: 217227 - DNA, 504 bp, Canis familiaris; identical to SEQ ID NO: 7120

SEQ ID NO: 217228 - DNA, 603 bp, Canis familiaris; identical to SEQ ID NO: 7121

SEQ ID NO: 217229 - DNA, 647 bp, Canis familiaris; identical to SEQ ID NO: 7122

SEQ ID NO: 217230 - DNA, 643 bp, Canis familiaris; identical to SEQ ID NO: 7123

SEQ ID NO: 217231 - DNA, 542 bp, Canis familiaris; identical to SEQ ID NO: 7124

SEQ ID NO: 217232 - DNA, 551 bp, Canis familiaris; identical to SEQ ID NO: 7125

SEQ ID NO: 217233 - DNA, 703 bp, Canis familiaris; identical to SEQ ID NO: 7126

SEQ ID NO: 217234 - DNA, 676 bp, Canis familiaris; identical to SEQ ID NO: 7127

SEQ ID NO: 217235 - DNA, 594 bp, Canis familiaris; identical to SEQ ID NO: 7128

SEQ ID NO: 217236 - DNA, 670 bp, Canis familiaris; identical to SEQ ID NO: 7129

SEQ ID NO: 217237 - DNA, 607 bp, Canis familiaris; identical to SEQ ID NO: 7130
  misc_feature (16)..(16): n is a, c, g, or t

SEQ ID NO: 217238 - DNA, 648 bp, Canis familiaris; identical to SEQ ID NO: 7131

SEQ ID NO: 217239 - DNA, 685 bp, Canis familiaris; identical to SEQ ID NO: 7132

SEQ ID NO: 217240 - DNA, 615 bp, Canis familiaris; identical to SEQ ID NO: 7133

SEQ ID NO: 217241 - DNA, 638 bp, Canis familiaris; identical to SEQ ID NO: 7134

SEQ ID NO: 217242 - DNA, 610 bp, Canis familiaris; identical to SEQ ID NO: 7135

SEQ ID NO: 217243 - DNA, 649 bp, Canis familiaris; identical to SEQ ID NO: 7136

SEQ ID NO: 217244 - DNA, 630 bp, Canis familiaris; identical to SEQ ID NO: 7137
  misc_feature (589)..(589): n is a, c, g, or t

SEQ ID NO: 217245 - DNA, 617 bp, Canis familiaris; identical to SEQ ID NO: 7138

SEQ ID NO: 217246 - DNA, 702 bp, Canis familiaris; identical to SEQ ID NO: 7139

SEQ ID NO: 217247 - DNA, 463 bp, Canis familiaris; identical to SEQ ID NO: 7140

SEQ ID NO: 217248 - DNA, 640 bp, Canis familiaris; identical to SEQ ID NO: 7141

SEQ ID NO: 217249 - DNA, 683 bp, Canis familiaris; identical to SEQ ID NO: 7142

SEQ ID NO: 217250 - DNA, 556 bp, Canis familiaris; identical to SEQ ID NO: 7143

SEQ ID NO: 217251 - DNA, 603 bp, Canis familiaris; identical to SEQ ID NO: 7144

SEQ ID NO: 217252 - DNA, 577 bp, Canis familiaris; identical to SEQ ID NO: 7145
  misc_feature (335)..(335): n is a, c, g, or t

SEQ ID NO: 217253 - DNA, 589 bp, Canis familiaris; identical to SEQ ID NO: 7146

SEQ ID NO: 217254 - DNA, 598 bp, Canis familiaris; identical to SEQ ID NO: 7147

SEQ ID NO: 217255 - DNA, 568 bp, Canis familiaris; identical to SEQ ID NO: 7148

SEQ ID NO: 217256 - DNA, 625 bp, Canis familiaris; identical to SEQ ID NO: 7149

SEQ ID NO: 217257 - DNA, 336 bp, Canis familiaris; identical to SEQ ID NO: 7150

SEQ ID NO: 217258 - DNA, 584 bp, Canis familiaris; identical to SEQ ID NO: 7151

SEQ ID NO: 217259 - DNA, 607 bp, Canis familiaris; identical to SEQ ID NO: 7152

SEQ ID NO: 217260 - DNA, 568 bp, Canis familiaris; identical to SEQ ID NO: 7153

SEQ ID NO: 217261 - DNA, 584 bp, Canis familiaris; identical to SEQ ID NO: 7154

SEQ ID NO: 217262 - DNA, 620 bp, Canis familiaris; identical to SEQ ID NO: 7155
  misc_feature (365)..(365): n is a, c, g, or t
  misc_feature (419)..(419): n is a, c, g, or t

SEQ ID NO: 217263 - DNA, 599 bp, Canis familiaris; identical to SEQ ID NO: 7156

SEQ ID NO: 217264 - DNA, 629 bp, Canis familiaris; identical to SEQ ID NO: 7157

SEQ ID NO: 217265 - DNA, 600 bp, Canis familiaris; identical to SEQ ID NO: 7158

SEQ ID NO: 217266 - DNA, 583 bp, Canis familiaris; identical to SEQ ID NO: 7159

SEQ ID NO: 217267 - DNA, 340 bp, Canis familiaris; identical to SEQ ID NO: 7160

SEQ ID NO: 217268 - DNA, 422 bp, Canis familiaris; identical to SEQ ID NO: 7161
  misc_feature (1)..(1): n is a, c, g, or t

SEQ ID NO: 217269 - DNA, 125 bp, Canis familiaris; identical to SEQ ID NO: 7162

SEQ ID NO: 217270 - DNA, 577 bp, Canis familiaris; identical to SEQ ID NO: 7163

SEQ ID NO: 217271 - DNA, 583 bp, Canis familiaris; identical to SEQ ID NO: 7164

SEQ ID NO: 217272 - DNA, 531 bp, Canis familiaris; identical to SEQ ID NO: 7165

SEQ ID NO: 217273 - DNA, 607 bp, Canis familiaris; identical to SEQ ID NO: 7166
  misc_feature (1)..(1): n is a, c, g, or t

SEQ ID NO: 217274 - DNA, 628 bp, Canis familiaris; identical to SEQ ID NO: 7167

SEQ ID NO: 217275 - DNA, 577 bp, Canis familiaris; identical to SEQ ID NO: 7168

SEQ ID NO: 217276 - DNA, 544 bp, Canis familiaris; identical to SEQ ID NO: 7169
  misc_feature (529)..(529): n is a, c, g, or t

SEQ ID NO: 217277 - DNA, 624 bp, Canis familiaris; identical to SEQ ID NO: 7170

SEQ ID NO: 217278 - DNA, 542 bp, Canis familiaris; identical to SEQ ID NO: 7171

SEQ ID NO: 217279 - DNA, 437 bp, Canis familiaris; identical to SEQ ID NO: 7172

SEQ ID NO: 217280 - DNA, 609 bp, Canis familiaris; identical to SEQ ID NO: 7173

SEQ ID NO: 217281 - DNA, 604 bp, Canis familiaris; identical to SEQ ID NO: 7174

SEQ ID NO: 217282 - DNA, 515 bp, Canis familiaris; identical to SEQ ID NO: 7175

SEQ ID NO: 217283 - DNA, 626 bp, Canis familiaris; identical to SEQ ID NO: 7176

SEQ ID NO: 217284 - DNA, 680 bp, Canis familiaris; identical to SEQ ID NO: 7177

SEQ ID NO: 217285 - DNA, 549 bp, Canis familiaris; identical to SEQ ID NO: 7178

SEQ ID NO: 217286 - DNA, 662 bp, Canis familiaris; identical to SEQ ID NO: 7179

SEQ ID NO: 217287 - DNA, 551 bp, Canis familiaris; identical to SEQ ID NO: 7180

SEQ ID NO: 217288 - DNA, 597 bp, Canis familiaris; identical to SEQ ID NO: 7181

SEQ ID NO: 217289 - DNA, 606 bp, Canis familiaris; identical to SEQ ID NO: 7182

SEQ ID NO: 217290 - DNA, 590 bp, Canis familiaris; identical to SEQ ID NO: 7183

SEQ ID NO: 217291 - DNA, 695 bp, Canis familiaris; identical to SEQ ID NO: 7184

SEQ ID NO: 217292 - DNA, 734 bp, Canis familiaris; identical to SEQ ID NO: 7185

SEQ ID NO: 217293 - DNA, 497 bp, Canis familiaris; identical to SEQ ID NO: 7186

SEQ ID NO: 217294 - DNA, 612 bp, Canis familiaris; identical to SEQ ID NO: 7187

SEQ ID NO: 217295 - DNA, 630 bp, Canis familiaris; identical to SEQ ID NO: 7188
  misc_feature (1)..(1): n is a, c, g, or t

SEQ ID NO: 217296 - DNA, 610 bp, Canis familiaris; identical to SEQ ID NO: 7189

SEQ ID NO: 217297 - DNA, 530 bp, Canis familiaris; identical to SEQ ID NO: 7190

SEQ ID NO: 217298 - DNA, 521 bp, Canis familiaris; identical to SEQ ID NO: 7191

SEQ ID NO: 217299 - DNA, 201 bp, Canis familiaris; identical to SEQ ID NO: 7192
  misc_feature (1)..(1): n is a, c, g, or t

SEQ ID NO: 217300 - DNA, 575 bp, Canis familiaris; identical to SEQ ID NO: 7193

SEQ ID NO: 217301 - DNA, 654 bp, Canis familiaris; identical to SEQ ID NO: 7194

SEQ ID NO: 217302 - DNA, 622 bp, Canis familiaris; identical to SEQ ID NO: 7195

SEQ ID NO: 217303 - DNA, 649 bp, Canis familiaris; identical to SEQ ID NO: 7196

SEQ ID NO: 217304 - DNA, 480 bp, Canis familiaris; identical to SEQ ID NO: 7197

SEQ ID NO: 217305 - DNA, 603 bp, Canis familiaris; identical to SEQ ID NO: 7198

SEQ ID NO: 217306 - DNA, 396 bp, Canis familiaris; identical to SEQ ID NO: 7199

SEQ ID NO: 217307 - DNA, 558 bp, Canis familiaris; identical to SEQ ID NO: 7200

SEQ ID NO: 217308 - DNA, 524 bp, Canis familiaris; identical to SEQ ID NO: 7201

SEQ ID NO: 217309 - DNA, 634 bp, Canis familiaris; identical to SEQ ID NO: 7202

SEQ ID NO: 217310 - DNA, 598 bp, Canis familiaris; identical to SEQ ID NO: 7203

SEQ ID NO: 217311 - DNA, 678 bp, Canis familiaris; identical to SEQ ID NO: 7204
  misc_feature (639)..(639): n is a, c, g, or t

SEQ ID NO: 217312 - DNA, 584 bp, Canis familiaris; identical to SEQ ID NO: 7205

SEQ ID NO: 217313 - DNA, 525 bp, Canis familiaris; identical to SEQ ID NO: 7206

SEQ ID NO: 217314 - DNA, 209 bp, Canis familiaris; identical to SEQ ID NO: 7207

SEQ ID NO: 217315 - DNA, 504 bp, Canis familiaris; identical to SEQ ID NO: 7208

SEQ ID NO: 217316 - DNA, 437 bp, Canis familiaris; identical to SEQ ID NO: 7209

SEQ ID NO: 217317 - DNA, 691 bp, Canis familiaris; identical to SEQ ID NO: 7210

SEQ ID NO: 217318 - DNA, 667 bp, Canis familiaris; identical to SEQ ID NO: 7211

SEQ ID NO: 217319 - DNA, 576 bp, Canis familiaris; identical to SEQ ID NO: 7212

SEQ ID NO: 217320 - DNA, 565 bp, Canis familiaris; identical to SEQ ID NO: 7213

SEQ ID NO: 217321 - DNA, 503 bp, Canis familiaris; identical to SEQ ID NO: 7214

SEQ ID NO: 217322 - DNA, 531 bp, Canis familiaris; identical to SEQ ID NO: 7215

SEQ ID NO: 217323 - DNA, 601 bp, Canis familiaris; identical to SEQ ID NO: 7216

SEQ ID NO: 217324 - DNA, 568 bp, Canis familiaris; identical to SEQ ID NO: 7217

SEQ ID NO: 217325 - DNA, 569 bp, Canis familiaris; identical to SEQ ID NO: 7218

SEQ ID NO: 217326 - DNA, 414 bp, Canis familiaris; identical to SEQ ID NO: 7219

SEQ ID NO: 217327 - DNA, 673 bp, Canis familiaris; identical to SEQ ID NO: 7220

SEQ ID NO: 217328 - DNA, 139 bp, Canis familiaris; identical to SEQ ID NO: 7221

SEQ ID NO: 217329 - DNA, 512 bp, Canis familiaris; identical to SEQ ID NO: 7222

SEQ ID NO: 217330 - DNA, 598 bp, Canis familiaris; identical to SEQ ID NO: 7223

SEQ ID NO: 217331 - DNA, 394 bp, Canis familiaris; identical to SEQ ID NO: 7224

SEQ ID NO: 217332 - DNA, 611 bp, Canis familiaris; identical to SEQ ID NO: 7225

SEQ ID NO: 217333 - DNA, 671 bp, Canis familiaris; identical to SEQ ID NO: 7226

SEQ ID NO: 217334 - DNA, 558 bp, Canis familiaris; identical to SEQ ID NO: 7227

SEQ ID NO: 217335 - DNA, 647 bp, Canis familiaris; identical to SEQ ID NO: 7228

SEQ ID NO: 217336 - DNA, 497 bp, Canis familiaris; identical to SEQ ID NO: 7229

SEQ ID NO: 217337 - DNA, 538 bp, Canis familiaris; identical to SEQ ID NO: 7230

SEQ ID NO: 217338 - DNA, 643 bp, Canis familiaris; identical to SEQ ID NO: 7231

SEQ ID NO: 217339 - DNA, 533 bp, Canis familiaris; identical to SEQ ID NO: 7232

SEQ ID NO: 217340 - DNA, 618 bp, Canis familiaris; identical to SEQ ID NO: 7233

SEQ ID NO: 217341 - DNA, 596 bp, Canis familiaris; identical to SEQ ID NO: 7234

SEQ ID NO: 217342 - DNA, 565 bp, Canis familiaris; identical to SEQ ID NO: 7235

SEQ ID NO: 217343 - DNA, 566 bp, Canis familiaris; identical to SEQ ID NO: 7236

SEQ ID NO: 217344 - DNA, 560 bp, Canis familiaris; identical to SEQ ID NO: 7237

SEQ ID NO: 217345 - DNA, 597 bp, Canis familiaris; identical to SEQ ID NO: 7238

SEQ ID NO: 217346 - DNA, 704 bp, Canis familiaris; identical to SEQ ID NO: 7239

SEQ ID NO: 217347 - DNA, 593 bp, Canis familiaris; identical to SEQ ID NO: 7240

SEQ ID NO: 217348 - DNA, 593 bp, Canis familiaris; identical to SEQ ID NO: 7241

SEQ ID NO: 217349 - DNA, 611 bp, Canis familiaris; identical to SEQ ID NO: 7242

SEQ ID NO: 217350 - DNA, 964 bp, Canis familiaris; identical to SEQ ID NO: 7243
  misc_feature (87)..(87): n is a, c, g, or t

SEQ ID NO: 217351 - DNA, 524 bp, Canis familiaris; identical to SEQ ID NO: 7244

SEQ ID NO: 217352 - DNA, 752 bp, Canis familiaris; identical to SEQ ID NO: 7245

SEQ ID NO: 217353 - DNA, 455 bp, Canis familiaris; identical to SEQ ID NO: 7246

SEQ ID NO: 217354 - DNA, 722 bp, Canis familiaris; identical to SEQ ID NO: 7247

SEQ ID NO: 217355 - DNA, 674 bp, Canis familiaris; identical to SEQ ID NO: 7248

SEQ ID NO: 217356 - DNA, 684 bp, Canis familiaris; identical to SEQ ID NO: 7249

SEQ ID NO: 217357 - DNA, 503 bp, Canis familiaris; identical to SEQ ID NO: 7250

SEQ ID NO: 217358 - DNA, 635 bp, Canis familiaris; identical to SEQ ID NO: 7251

SEQ ID NO: 217359 - DNA, 616 bp, Canis familiaris; identical to SEQ ID NO: 7252

SEQ ID NO: 217360 - DNA, 591 bp, Canis familiaris; identical to SEQ ID NO: 7253

SEQ ID NO: 217361 - DNA, 677 bp, Canis familiaris; identical to SEQ ID NO: 7254

SEQ ID NO: 217362 - DNA, 669 bp, Canis familiaris; identical to SEQ ID NO: 7255

SEQ ID NO: 217363 - DNA, 592 bp, Canis familiaris; identical to SEQ ID NO: 7256

SEQ ID NO: 217364 - DNA, 642 bp, Canis familiaris; identical to SEQ ID NO: 7257

SEQ ID NO: 217365 - DNA, 599 bp, Canis familiaris; identical to SEQ ID NO: 7258

SEQ ID NO: 217366 - DNA, 595 bp, Canis familiaris; identical to SEQ ID NO: 7259

SEQ ID NO: 217367 - DNA, 625 bp, Canis familiaris; identical to SEQ ID NO: 7260

SEQ ID NO: 217368 - DNA, 652 bp, Canis familiaris; identical to SEQ ID NO: 7261
  misc_feature (1)..(1): n is a, c, g, or t

SEQ ID NO: 217369 - DNA, 543 bp, Canis familiaris; identical to SEQ ID NO: 7262

SEQ ID NO: 217370 - DNA, 497 bp, Canis familiaris; identical to SEQ ID NO: 7263
  misc_feature (1)..(1): n is a, c, g, or t

SEQ ID NO: 217371 - DNA, 638 bp, Canis familiaris; identical to SEQ ID NO: 7264
  misc_feature (282)..(282): n is a, c, g, or t

SEQ ID NO: 217372 - DNA, 556 bp, Canis familiaris; identical to SEQ ID NO: 7265

SEQ ID NO: 217373 - DNA, 588 bp, Canis familiaris; identical to SEQ ID NO: 7266

SEQ ID NO: 217374 - DNA, 629 bp, Canis familiaris; identical to SEQ ID NO: 7267
  misc_feature (20)..(20): n is a, c, g, or t

SEQ ID NO: 217375 - DNA, 495 bp, Canis familiaris; identical to SEQ ID NO: 7268
  misc_feature (27)..(27): n is a, c, g, or t
  misc_feature (48)..(48): n is a, c, g, or t
  misc_feature (65)..(66): n is a, c, g, or t
  misc_feature (77)..(78): n is a, c, g, or t
  misc_feature (87)..(88): n is a, c, g, or t
  misc_feature (110)..(110): n is a, c, g, or t

SEQ ID NO: 217376 - DNA, 653 bp, Canis familiaris; identical to SEQ ID NO: 7269
  misc_feature (53)..(53): n is a, c, g, or t

SEQ ID NO: 217377 - DNA, 632 bp, Canis familiaris; identical to SEQ ID NO: 7270

SEQ ID NO: 217378 - DNA, 345 bp, Canis familiaris; identical to SEQ ID NO: 7271

SEQ ID NO: 217379 - DNA, 573 bp, Canis familiaris; identical to SEQ ID NO: 7272
  misc_feature (221)..(221): n is a, c, g, or t

SEQ ID NO: 217380 - DNA, 569 bp, Canis familiaris; identical to SEQ ID NO: 7273

SEQ ID NO: 217381 - DNA, 602 bp, Canis familiaris; identical to SEQ ID NO: 7274

SEQ ID NO: 217382 - DNA, 682 bp, Canis familiaris; identical to SEQ ID NO: 7275

SEQ ID NO: 217383 - DNA, 637 bp, Canis familiaris; identical to SEQ ID NO: 7276

SEQ ID NO: 217384 - DNA, 661 bp, Canis familiaris; identical to SEQ ID NO: 7277

SEQ ID NO: 217385 - DNA, 114 bp, Canis familiaris; identical to SEQ ID NO: 7278

SEQ ID NO: 217386 - DNA, 685 bp, Canis familiaris; identical to SEQ ID NO: 7279

SEQ ID NO: 217387 - DNA, 598 bp, Canis familiaris; identical to SEQ ID NO: 7280

SEQ ID NO: 217388 - DNA, 630 bp, Canis familiaris; identical to SEQ ID NO: 7281
  misc_feature (92)..(92): n is a, c, g, or t
  misc_feature (114)..(114): n is a, c, g, or t

SEQ ID NO: 217389 - DNA, 656 bp, Canis familiaris; identical to SEQ ID NO: 7282

SEQ ID NO: 217390 - DNA, 236 bp, Canis familiaris; identical to SEQ ID NO: 7283

SEQ ID NO: 217391 - DNA, 630 bp, Canis familiaris; identical to SEQ ID NO: 7284
  misc_feature (201)..(201): n is a, c, g, or t
  misc_feature (216)..(217): n is a, c, g, or t

SEQ ID NO: 217392 - DNA, 617 bp, Canis familiaris; identical to SEQ ID NO: 7285

SEQ ID NO: 217393 - DNA, 606 bp, Canis familiaris; identical to SEQ ID NO: 7286

SEQ ID NO: 217394 - DNA, 615 bp, Canis familiaris; identical to SEQ ID NO: 7287

SEQ ID NO: 217395 - DNA, 587 bp, Canis familiaris; identical to SEQ ID NO: 7288

SEQ ID NO: 217396 - DNA, 638 bp, Canis familiaris; identical to SEQ ID NO: 7289
  misc_feature (403)..(403): n is a, c, g, or t

SEQ ID NO: 217397 - DNA, 630 bp, Canis familiaris; identical to SEQ ID NO: 7290

SEQ ID NO: 217398 - DNA, 642 bp, Canis familiaris; identical to SEQ ID NO: 7291

SEQ ID NO: 217399 - DNA, 646 bp, Canis familiaris; identical to SEQ ID NO: 7292
  misc_feature (24)..(24): n is a, c, g, or t

SEQ ID NO: 217400 - DNA, 588 bp, Canis familiaris; identical to SEQ ID NO: 7293
  misc_feature (207)..(207): n is a, c, g, or t

SEQ ID NO: 217401 - DNA, 502 bp, Canis familiaris; identical to SEQ ID NO: 7294

SEQ ID NO: 217402 - DNA, 628 bp, Canis familiaris; identical to SEQ ID NO: 7295

SEQ ID NO: 217403 - DNA, 569 bp, Canis familiaris; identical to SEQ ID NO: 7296

SEQ ID NO: 217404 - DNA, 594 bp, Canis familiaris; identical to SEQ ID NO: 7297

SEQ ID NO: 217405 - DNA, 571 bp, Canis familiaris; identical to SEQ ID NO: 7298
  misc_feature (13)..(13): n is a, c, g, or t
  misc_feature (34)..(34): n is a, c, g, or t
  misc_feature (51)..(52): n is a, c, g, or t
  misc_feature (54)..(54): n is a, c, g, or t
  misc_feature (63)..(64): n is a, c, g, or t
  misc_feature (66)..(66): n is a, c, g, or t
  misc_feature (81)..(83): n is a, c, g, or t
  misc_feature (92)..(93): n is a, c, g, or t
  misc_feature (95)..(95): n is a, c, g, or t
  misc_feature (100)..(100): n is a, c, g, or t
  misc_feature (103)..(103): n is a, c, g, or t
  misc_feature (105)..(105): n is a, c, g, or t
  misc_feature (111)..(111): n is a, c, g, or t
  misc_feature (113)..(113): n is a, c, g, or t
  misc_feature (115)..(115): n is a, c, g, or t
  misc_feature (130)..(130): n is a, c, g, or t
  misc_feature (135)..(135): n is a, c, g, or t
  misc_feature (140)..(142): n is a, c, g, or t
  misc_feature (149)..(149): n is a, c, g, or t
  misc_feature (158)..(159): n is a, c, g, or t
  misc_feature (166)..(166): n is a, c, g, or t
  misc_feature (255)..(255): n is a, c, g, or t
  misc_feature (277)..(277): n is a, c, g, or t
  misc_feature (303)..(303): n is a, c, g, or t
  misc_feature (320)..(320): n is a, c, g, or t

SEQ ID NO: 217406 - DNA, 702 bp, Canis familiaris; identical to SEQ ID NO: 7299

SEQ ID NO: 217407 - DNA, 607 bp, Canis familiaris; identical to SEQ ID NO: 7300

SEQ ID NO: 217408 - DNA, 554 bp, Canis familiaris; identical to SEQ ID NO: 7301
  misc_feature (125)..(125): n is a, c, g, or t
  misc_feature (192)..(193): n is a, c, g, or t

SEQ ID NO: 217409 - DNA, 648 bp, Canis familiaris; identical to SEQ ID NO: 7302

SEQ ID NO: 217410 - DNA, 565 bp, Canis familiaris; identical to SEQ ID NO: 7303

SEQ ID NO: 217411 - DNA, 522 bp, Canis familiaris; identical to SEQ ID NO: 7304
  misc_feature (1)..(1): n is a, c, g, or t
  misc_feature (111)..(111): n is a, c, g, or t

SEQ ID NO: 217412 - DNA, 563 bp, Canis familiaris; identical to SEQ ID NO: 7305
  misc_feature (170)..(170): n is a, c, g, or t

SEQ ID NO: 217413 - DNA, 617 bp, Canis familiaris; identical to SEQ ID NO: 7306

SEQ ID NO: 217414 - DNA, 639 bp, Canis familiaris; identical to SEQ ID NO: 7307

SEQ ID NO: 217415 - DNA, 535 bp, Canis familiaris; identical to SEQ ID NO: 7308

SEQ ID NO: 217416 - DNA, 457 bp, Canis familiaris; identical to SEQ ID NO: 7309

SEQ ID NO: 217417 - DNA, 465 bp, Canis familiaris; identical to SEQ ID NO: 7310

SEQ ID NO: 217418 - DNA, 600 bp, Canis familiaris; identical to SEQ ID NO: 7311

SEQ ID NO: 217419 - DNA, 421 bp, Canis familiaris; identical to SEQ ID NO: 7312

SEQ ID NO: 217420 - DNA, 599 bp, Canis familiaris; identical to SEQ ID NO: 7313

SEQ ID NO: 217421 - DNA, 617 bp, Canis familiaris; identical to SEQ ID NO: 7314
  misc_feature (42)..(43): n is a, c, g, or t
  misc_feature (70)..(71): n is a, c, g, or t
  misc_feature (128)..(128): n is a, c, g, or t
  misc_feature (197)..(197): n is a, c, g, or t
  misc_feature (390)..(390): n is a, c, g, or t

SEQ ID NO: 217422 - DNA, 453 bp, Canis familiaris; identical to SEQ ID NO: 7315

SEQ ID NO: 217423 - DNA, 298 bp, Canis familiaris; identical to SEQ ID NO: 7316

SEQ ID NO: 217424 - DNA, 442 bp, Canis familiaris; identical to SEQ ID NO: 7317
  misc_feature (168)..(168): n is a, c, g, or t

SEQ ID NO: 217425 - DNA, 409 bp, Canis familiaris; identical to SEQ ID NO: 7318

SEQ ID NO: 217426 - DNA, 536 bp, Canis familiaris; identical to SEQ ID NO: 7319
  misc_feature (278)..(278): n is a, c, g, or t

SEQ ID NO: 217427 - DNA, 468 bp, Canis familiaris; identical to SEQ ID NO: 7320
  misc_feature (72)..(72): n is a, c, g, or t
  misc_feature (161)..(161): n is a, c, g, or t

SEQ ID NO: 217428 - DNA, 672 bp, Canis familiaris; identical to SEQ ID NO: 7321
  misc_feature (31)..(31): n is a, c, g, or t

SEQ ID NO: 217429 - DNA, 749 bp, Canis familiaris; identical to SEQ ID NO: 7322
  misc_feature (1)..(1): n is a, c, g, or t
  misc_feature (273)..(274): n is a, c, g, or t

SEQ ID NO: 217430 - DNA, 667 bp, Canis familiaris; identical to SEQ ID NO: 7323

SEQ ID NO: 217431 - DNA, 625 bp, Canis familiaris; identical to SEQ ID NO: 7324

SEQ ID NO: 217432 - DNA, 641 bp, Canis familiaris; identical to SEQ ID NO: 7325
  misc_feature (12)..(12): n is a, c, g, or t

SEQ ID NO: 217433 - DNA, 573 bp, Canis familiaris; identical to SEQ ID NO: 7326

SEQ ID NO: 217434 - DNA, 566 bp, Canis familiaris; identical to SEQ ID NO: 7327
  misc_feature (106)..(106): n is a, c, g, or t

SEQ ID NO: 217435 - DNA, 664 bp, Canis familiaris; identical to SEQ ID NO: 7328

SEQ ID NO: 217436 - DNA, 640 bp, Canis familiaris; identical to SEQ ID NO: 7329
  misc_feature (594)..(594): n is a, c, g, or t

SEQ ID NO: 217437 - DNA, 619 bp, Canis familiaris; identical to SEQ ID NO: 7330

SEQ ID NO: 217438 - DNA, 464 bp, Canis familiaris; identical to SEQ ID NO: 7331

SEQ ID NO: 217439 - DNA, 629 bp, Canis familiaris; identical to SEQ ID NO: 7332

SEQ ID NO: 217440 - DNA, 223 bp, Canis familiaris; identical to SEQ ID NO: 7333

SEQ ID NO: 217441 - DNA, 520 bp, Canis familiaris; identical to SEQ ID NO: 7334
  misc_feature (1)..(1): n is a, c, g, or t

SEQ ID NO: 217442 - DNA, 556 bp, Canis familiaris; identical to SEQ ID NO: 7335
  misc_feature (1)..(1): n is a, c, g, or t

SEQ ID NO: 217443 - DNA, 668 bp, Canis familiaris; identical to SEQ ID NO: 7336

SEQ ID NO: 217444 - DNA, 644 bp, Canis familiaris; identical to SEQ ID NO: 7337

SEQ ID NO: 217445 - DNA, 623 bp, Canis familiaris; identical to SEQ ID NO: 7338

SEQ ID NO: 217446 - DNA, 487 bp, Canis familiaris; identical to SEQ ID NO: 7339

SEQ ID NO: 217447 - DNA, 549 bp, Canis familiaris; identical to SEQ ID NO: 7340

SEQ ID NO: 217448 - DNA, 639 bp, Canis familiaris; identical to SEQ ID NO: 7341

SEQ ID NO: 217449 - DNA, 591 bp, Canis familiaris; identical to SEQ ID NO: 7342

SEQ ID NO: 217450 - DNA, 458 bp, Canis familiaris; identical to SEQ ID NO: 7343

SEQ ID NO: 217451 - DNA, 543 bp, Canis familiaris; identical to SEQ ID NO: 7344

SEQ ID NO: 217452 - DNA, 605 bp, Canis familiaris; identical to SEQ ID NO: 7345

SEQ ID NO: 217453 - DNA, 591 bp, Canis familiaris; identical to SEQ ID NO: 7346

SEQ ID NO: 217454 - DNA, 108 bp, Canis familiaris; identical to SEQ ID NO: 7347

SEQ ID NO: 217455 - DNA, 686 bp, Canis familiaris; identical to SEQ ID NO: 7348

SEQ ID NO: 217456 - DNA, 574 bp, Canis familiaris; identical to SEQ ID NO: 7349

SEQ ID NO: 217457 - DNA, 696 bp, Canis familiaris; identical to SEQ ID NO: 7350

SEQ ID NO: 217458 - DNA, 549 bp, Canis familiaris; identical to SEQ ID NO: 7351

SEQ ID NO: 217459 - DNA, 543 bp, Canis familiaris; identical to SEQ ID NO: 7352

SEQ ID NO: 217460 - DNA, 513 bp, Canis familiaris; identical to SEQ ID NO: 7353

SEQ ID NO: 217461 - DNA, 670 bp, Canis familiaris; identical to SEQ ID NO: 7354

SEQ ID NO: 217462 - DNA, 642 bp, Canis familiaris; identical to SEQ ID NO: 7355

SEQ ID NO: 217463 - DNA, 530 bp, Canis familiaris; identical to SEQ ID NO: 7356

SEQ ID NO: 217464 - DNA, 572 bp, Canis familiaris; identical to SEQ ID NO: 7357

SEQ ID NO: 217465 - DNA, 498 bp, Canis familiaris; identical to SEQ ID NO: 7358

SEQ ID NO: 217466 - DNA, 517 bp, Canis familiaris; identical to SEQ ID NO: 7359
  misc_feature (1)..(1): n is a, c, g, or t

SEQ ID NO: 217467 - DNA, 617 bp, Canis familiaris; identical to SEQ ID NO: 7360
  misc_feature (138)..(138): n is a, c, g, or t

SEQ ID NO: 217468 - DNA, 406 bp, Canis familiaris; identical to SEQ ID NO: 7361
  misc_feature (1)..(1): n is a, c, g, or t

SEQ ID NO: 217469 - DNA, 447 bp, Canis familiaris; identical to SEQ ID NO: 7362

SEQ ID NO: 217470 - DNA, 626 bp, Canis familiaris; identical to SEQ ID NO: 7363
  misc_feature (477)..(477): n is a, c, g, or t

SEQ ID NO: 217471 - DNA, 649 bp, Canis familiaris; identical to SEQ ID NO: 7364
  misc_feature (367)..(367): n is a, c, g, or t

SEQ ID NO: 217472 - DNA, 662 bp, Canis familiaris; identical to SEQ ID NO: 7365

SEQ ID NO: 217473 - DNA, 572 bp, Canis familiaris; identical to SEQ ID NO: 7366

SEQ ID NO: 217474 - DNA, 591 bp, Canis familiaris; identical to SEQ ID NO: 7367

SEQ ID NO: 217475 - DNA, 459 bp, Canis familiaris; identical to SEQ ID NO: 7368

SEQ ID NO: 217476 - DNA, 641 bp, Canis familiaris; identical to SEQ ID NO: 7369

SEQ ID NO: 217477 - DNA, 607 bp, Canis familiaris; identical to SEQ ID NO: 7370

SEQ ID NO: 217478 - DNA, 648 bp, Canis familiaris; identical to SEQ ID NO: 7371

SEQ ID NO: 217479 - DNA, 689 bp, Canis familiaris; identical to SEQ ID NO: 7372

SEQ ID NO: 217480 - DNA, 630 bp, Canis familiaris; identical to SEQ ID NO: 7373

SEQ ID NO: 217481 - DNA, 628 bp, Canis familiaris; identical to SEQ ID NO: 7374

SEQ ID NO: 217482 - DNA, 101 bp, Canis familiaris; identical to SEQ ID NO: 7375

SEQ ID NO: 217483 - DNA, 536 bp, Canis familiaris; identical to SEQ ID NO: 7376

SEQ ID NO: 217484 - DNA, 647 bp, Canis familiaris; identical to SEQ ID NO: 7377

SEQ ID NO: 217485 - DNA, 490 bp, Canis familiaris; identical to SEQ ID NO: 7378

SEQ ID NO: 217486 - DNA, 470 bp, Canis familiaris; identical to SEQ ID NO: 7379
  misc_feature (1)..(1): n is a, c, g, or t

SEQ ID NO: 217487 - DNA, 546 bp, Canis familiaris; identical to SEQ ID NO: 7380

SEQ ID NO: 217488 - DNA, 572 bp, Canis familiaris; identical to SEQ ID NO: 7381

SEQ ID NO: 217489 - DNA, 503 bp, Canis familiaris; identical to SEQ ID NO: 7382

SEQ ID NO: 217490 - DNA, 102 bp, Canis familiaris; identical to SEQ ID NO: 7383

SEQ ID NO: 217491 - DNA, 626 bp, Canis familiaris; identical to SEQ ID NO: 7384

SEQ ID NO: 217492 - DNA, 626 bp, Canis familiaris; identical to SEQ ID NO: 7385
  misc_feature (1)..(1): n is a, c, g, or t

SEQ ID NO: 217493 - DNA, 548 bp, Canis familiaris; identical to SEQ ID NO: 7386

SEQ ID NO: 217494 - DNA, 595 bp, Canis familiaris; identical to SEQ ID NO: 7387

SEQ ID NO: 217495 - DNA, 581 bp, Canis familiaris; identical to SEQ ID NO: 7388

SEQ ID NO: 217496 - DNA, 631 bp, Canis familiaris; identical to SEQ ID NO: 7389

SEQ ID NO: 217497 - DNA, 378 bp, Canis familiaris; identical to SEQ ID NO: 7390

SEQ ID NO: 217498 - DNA, 548 bp, Canis familiaris; identical to SEQ ID NO: 7391

SEQ ID NO: 217499 - DNA, 676 bp, Canis familiaris; identical to SEQ ID NO: 7392

SEQ ID NO: 217500 - DNA, 624 bp, Canis familiaris; identical to SEQ ID NO: 7393

SEQ ID NO: 217501 - DNA, 664 bp, Canis familiaris; identical to SEQ ID NO: 7394

SEQ ID NO: 217502 - DNA, 530 bp, Canis familiaris; identical to SEQ ID NO: 7395

SEQ ID NO: 217503 - DNA, 106 bp, Canis familiaris; identical to SEQ ID NO: 7396

SEQ ID NO: 217504 - DNA, 457 bp, Canis familiaris; identical to SEQ ID NO: 7397

SEQ ID NO: 217505 - DNA, 301 bp, Canis familiaris; identical to SEQ ID NO: 7398

SEQ ID NO: 217506 - DNA, 111 bp, Canis familiaris; identical to SEQ ID NO: 7399

SEQ ID NO: 217507 - DNA, 556 bp, Canis familiaris; identical to SEQ ID NO: 7400

SEQ ID NO: 217508 - DNA, 634 bp, Canis familiaris; identical to SEQ ID NO: 7401

SEQ ID NO: 217509 - DNA, 635 bp, Canis familiaris; identical to SEQ ID NO: 7402

SEQ ID NO: 217510 - DNA, 598 bp, Canis familiaris; identical to SEQ ID NO: 7403

SEQ ID NO: 217511 - DNA, 622 bp, Canis familiaris; identical to SEQ ID NO: 7404

SEQ ID NO: 217512 - DNA, 632 bp, Canis familiaris; identical to SEQ ID NO: 7405

SEQ ID NO: 217513 - DNA, 699 bp, Canis familiaris; identical to SEQ ID NO: 7406

SEQ ID NO: 217514 - DNA, 628 bp, Canis familiaris; identical to SEQ ID NO: 7407

SEQ ID NO: 217515 - DNA, 607 bp, Canis familiaris; identical to SEQ ID NO: 7408
  misc_feature (377)..(377): n is a, c, g, or t

SEQ ID NO: 217516 - DNA, 629 bp, Canis familiaris; identical to SEQ ID NO: 7409

SEQ ID NO: 217517 - DNA, 611 bp, Canis familiaris; identical to SEQ ID NO: 7410

SEQ ID NO: 217518 - DNA, 632 bp, Canis familiaris; identical to SEQ ID NO: 7411

SEQ ID NO: 217519 - DNA, 625 bp, Canis familiaris; identical to SEQ ID NO: 7412

SEQ ID NO: 217520 - DNA, 473 bp, Canis familiaris; identical to SEQ ID NO: 7413
  misc_feature (266)..(266): n is a, c, g, or t

SEQ ID NO: 217521 - DNA, 503 bp, Canis familiaris; identical to SEQ ID NO: 7414

SEQ ID NO: 217522 - DNA, 632 bp, Canis familiaris; identical to SEQ ID NO: 7415

SEQ ID NO: 217523 - DNA, 703 bp, Canis familiaris; identical to SEQ ID NO: 7416

SEQ ID NO: 217524 - DNA, 598 bp, Canis familiaris; identical to SEQ ID NO: 7417

SEQ ID NO: 217525 - DNA, 692 bp, Canis familiaris; identical to SEQ ID NO: 7418

SEQ ID NO: 217526 - DNA, 656 bp, Canis familiaris; identical to SEQ ID NO: 7419

SEQ ID NO: 217527 - DNA, 590 bp, Canis familiaris; identical to SEQ ID NO: 7420

SEQ ID NO: 217528 - DNA, 655 bp, Canis familiaris; identical to SEQ ID NO: 7421

SEQ ID NO: 217529 - DNA, 636 bp, Canis familiaris; identical to SEQ ID NO: 7422

SEQ ID NO: 217530 - DNA, 667 bp, Canis familiaris; identical to SEQ ID NO: 7423

SEQ ID NO: 217531 - DNA, 560 bp, Canis familiaris; identical to SEQ ID NO: 7424

SEQ ID NO: 217532 - DNA, 372 bp, Canis familiaris; identical to SEQ ID NO: 7425

SEQ ID NO: 217533 - DNA, 547 bp, Canis familiaris; identical to SEQ ID NO: 7426

SEQ ID NO: 217534 - DNA, 587 bp, Canis familiaris; identical to SEQ ID NO: 7427

SEQ ID NO: 217535 - DNA, 531 bp, Canis familiaris; identical to SEQ ID NO: 7428

SEQ ID NO: 217536 - DNA, 197 bp, Canis familiaris; identical to SEQ ID NO: 7429

SEQ ID NO: 217537 - DNA, 554 bp, Canis familiaris; identical to SEQ ID NO: 7430

SEQ ID NO: 217538 - DNA, 503 bp, Canis familiaris; identical to SEQ ID NO: 7431

SEQ ID NO: 217539 - DNA, 517 bp, Canis familiaris; identical to SEQ ID NO: 7432
  misc_feature (1)..(1): n is a, c, g, or t

SEQ ID NO: 217540 - DNA, 627 bp, Canis familiaris; identical to SEQ ID NO: 7433

SEQ ID NO: 217541 - DNA, 535 bp, Canis familiaris; identical to SEQ ID NO: 7434

SEQ ID NO: 217542 - DNA, 609 bp, Canis familiaris; identical to SEQ ID NO: 7435

SEQ ID NO: 217543 - DNA, 490 bp, Canis familiaris; identical to SEQ ID NO: 7436

SEQ ID NO: 217544 - DNA, 563 bp, Canis familiaris; identical to SEQ ID NO: 7437

SEQ ID NO: 217545 - DNA, 510 bp, Canis familiaris; identical to SEQ ID NO: 7438

SEQ ID NO: 217546 - DNA, 590 bp, Canis familiaris; identical to SEQ ID NO: 7439

SEQ ID NO: 217547 - DNA, 624 bp, Canis familiaris; identical to SEQ ID NO: 7440

SEQ ID NO: 217548 - DNA, 566 bp, Canis familiaris; identical to SEQ ID NO: 7441

SEQ ID NO: 217549 - DNA, 469 bp, Canis familiaris; identical to SEQ ID NO: 7442

SEQ ID NO: 217550 - DNA, 617 bp, Canis familiaris; identical to SEQ ID NO: 7443

SEQ ID NO: 217551 - DNA, 611 bp, Canis familiaris; identical to SEQ ID NO: 7444

SEQ ID NO: 217552 - DNA, 690 bp, Canis familiaris; identical to SEQ ID NO: 7445

SEQ ID NO: 217553 - DNA, 603 bp, Canis familiaris; identical to SEQ ID NO: 7446

SEQ ID NO: 217554 - DNA, 593 bp, Canis familiaris; identical to SEQ ID NO: 7447

SEQ ID NO: 217555 - DNA, 650 bp, Canis familiaris; identical to SEQ ID NO: 7448

SEQ ID NO: 217556 - DNA, 578 bp, Canis familiaris; identical to SEQ ID NO: 7449

SEQ ID NO: 217557 - DNA, 637 bp, Canis familiaris; identical to SEQ ID NO: 7450

SEQ ID NO: 217558 - DNA, 558 bp, Canis familiaris; identical to SEQ ID NO: 7451

SEQ ID NO: 217559 - DNA, 634 bp, Canis familiaris; identical to SEQ ID NO: 7452
  misc_feature (328)..(328): n is a, c, g, or t

SEQ ID NO: 217560 - DNA, 496 bp, Canis familiaris; identical to SEQ ID NO: 7453
  misc_feature (1)..(1): n is a, c, g, or t

SEQ ID NO: 217561 - DNA, 616 bp, Canis familiaris; identical to SEQ ID NO: 7454

SEQ ID NO: 217562 - DNA, 546 bp, Canis familiaris; identical to SEQ ID NO: 7455

SEQ ID NO: 217563 - DNA, 650 bp, Canis familiaris; identical to SEQ ID NO: 7456

SEQ ID NO: 217564 - DNA, 664 bp, Canis familiaris; identical to SEQ ID NO: 7457

SEQ ID NO: 217565 - DNA, 563 bp, Canis familiaris; identical to SEQ ID NO: 7458

SEQ ID NO: 217566 - DNA, 644 bp, Canis familiaris; identical to SEQ ID NO: 7459
  misc_feature (71)..(71): n is a, c, g, or t

SEQ ID NO: 217567 - DNA, 608 bp, Canis familiaris; identical to SEQ ID NO: 7460

SEQ ID NO: 217568 - DNA, 699 bp, Canis familiaris; identical to SEQ ID NO: 7461
  misc_feature (33)..(33): n is a, c, g, or t

SEQ ID NO: 217569 - DNA, 626 bp, Canis familiaris; identical to SEQ ID NO: 7462

SEQ ID NO: 217570 - DNA, 607 bp, Canis familiaris; identical to SEQ ID NO: 7463

SEQ ID NO: 217571 - DNA, 489 bp, Canis familiaris; identical to SEQ ID NO: 7464

SEQ ID NO: 217572 - DNA, 581 bp, Canis familiaris; identical to SEQ ID NO: 7465

SEQ ID NO: 217573 - DNA, 588 bp, Canis familiaris; identical to SEQ ID NO: 7466

SEQ ID NO: 217574 - DNA, 541 bp, Canis familiaris; identical to SEQ ID NO: 7467

SEQ ID NO: 217575 - DNA, 467 bp, Canis familiaris; identical to SEQ ID NO: 7468

SEQ ID NO: 217576 - DNA, 529 bp, Canis familiaris; identical to SEQ ID NO: 7469

SEQ ID NO: 217577 - DNA, 489 bp, Canis familiaris; identical to SEQ ID NO: 7470

SEQ ID NO: 217578 - DNA, 515 bp, Canis familiaris; identical to SEQ ID NO: 7471

SEQ ID NO: 217579 - DNA, 537 bp, Canis familiaris; identical to SEQ ID NO: 7472

SEQ ID NO: 217580 - DNA, 555 bp, Canis familiaris; identical to SEQ ID NO: 7473

SEQ ID NO: 217581 - DNA, 652 bp, Canis familiaris; identical to SEQ ID NO: 7474

SEQ ID NO: 217582 - DNA, 218 bp, Canis familiaris; identical to SEQ ID NO: 7475

SEQ ID NO: 217583 - DNA, 663 bp, Canis familiaris; identical to SEQ ID NO: 7476

SEQ ID NO: 217584 - DNA, 618 bp, Canis familiaris; identical to SEQ ID NO: 7477

SEQ ID NO: 217585 - DNA, 639 bp, Canis familiaris; identical to SEQ ID NO: 7478

SEQ ID NO: 217586 - DNA, 576 bp, Canis familiaris; identical to SEQ ID NO: 7479

SEQ ID NO: 217587 - DNA, 603 bp, Canis familiaris; identical to SEQ ID NO: 7480

SEQ ID NO: 217588 - DNA, 456 bp, Canis familiaris; identical to SEQ ID NO: 7481

SEQ ID NO: 217589 - DNA, 610 bp, Canis familiaris; identical to SEQ ID NO: 7482
  misc_feature (139)..(139): n is a, c, g, or t

SEQ ID NO: 217590 - DNA, 515 bp, Canis familiaris; identical to SEQ ID NO: 7483

SEQ ID NO: 217591 - DNA, 641 bp, Canis familiaris; identical to SEQ ID NO: 7484

SEQ ID NO: 217592 - DNA, 678 bp, Canis familiaris; identical to SEQ ID NO: 7485

SEQ ID NO: 217593 - DNA, 664 bp, Canis familiaris; identical to SEQ ID NO: 7486

SEQ ID NO: 217594 - DNA, 290 bp, Canis familiaris; identical to SEQ ID NO: 7487

SEQ ID NO: 217595 - DNA, 635 bp, Canis familiaris; identical to SEQ ID NO: 7488
  misc_feature (46)..(46): n is a, c, g, or t

SEQ ID NO: 217596 - DNA, 616 bp, Canis familiaris; identical to SEQ ID NO: 7489

SEQ ID NO: 217597 - DNA, 637 bp, Canis familiaris; identical to SEQ ID NO: 7490

SEQ ID NO: 217598 - DNA, 472 bp, Canis familiaris; identical to SEQ ID NO: 7491

SEQ ID NO: 217599 - DNA, 615 bp, Canis familiaris; identical to SEQ ID NO: 7492

SEQ ID NO: 217600 - DNA, 625 bp, Canis familiaris; identical to SEQ ID NO: 7493

SEQ ID NO: 217601 - DNA, 661 bp, Canis familiaris; identical to SEQ ID NO: 7494
  misc_feature (28)..(28): n is a, c, g, or t

SEQ ID NO: 217602 - DNA, 726 bp, Canis familiaris; identical to SEQ ID NO: 7495

SEQ ID NO: 217603 - DNA, 431 bp, Canis familiaris; identical to SEQ ID NO: 7496

SEQ ID NO: 217604 - DNA, 606 bp, Canis familiaris; identical to SEQ ID NO: 7497

SEQ ID NO: 217605 - DNA, 601 bp, Canis familiaris; identical to SEQ ID NO: 7498

SEQ ID NO: 217606 - DNA, 504 bp, Canis familiaris; identical to SEQ ID NO: 7499

SEQ ID NO: 217607 - DNA, 571 bp, Canis familiaris; identical to SEQ ID NO: 7500

SEQ ID NO: 217608 - DNA, 494 bp, Canis familiaris; identical to SEQ ID NO: 7501
  misc_feature (1)..(1): n is a, c, g, or t

SEQ ID NO: 217609 - DNA, 538 bp, Canis familiaris; identical to SEQ ID NO: 7502

SEQ ID NO: 217610 - DNA, 696 bp, Canis familiaris; identical to SEQ ID NO: 7503

SEQ ID NO: 217611 - DNA, 551 bp, Canis familiaris; identical to SEQ ID NO: 7504

SEQ ID NO: 217612 - DNA, 555 bp, Canis familiaris; identical to SEQ ID NO: 7505

SEQ ID NO: 217613 - DNA, 498 bp, Canis familiaris; identical to SEQ ID NO: 7506

SEQ ID NO: 217614 - DNA, 364 bp, Canis familiaris; identical to SEQ ID NO: 7507
  misc_feature (130)..(130): n is a, c, g, or t

SEQ ID NO: 217615 - DNA, 548 bp, Canis familiaris; identical to SEQ ID NO: 7508

SEQ ID NO: 217616 - DNA, 592 bp, Canis familiaris; identical to SEQ ID NO: 7509

SEQ ID NO: 217617 - DNA, 536 bp, Canis familiaris; identical to SEQ ID NO: 7510

SEQ ID NO: 217618 - DNA, 516 bp, Canis familiaris; identical to SEQ ID NO: 7511

SEQ ID NO: 217619 - DNA, 500 bp, Canis familiaris; identical to SEQ ID NO: 7512
  misc_feature (1)..(1): n is a, c, g, or t

SEQ ID NO: 217620 - DNA, 622 bp, Canis familiaris; identical to SEQ ID NO: 7513

SEQ ID NO: 217621 - DNA, 627 bp, Canis familiaris; identical to SEQ ID NO: 7514

SEQ ID NO: 217622 - DNA, 212 bp, Canis familiaris; identical to SEQ ID NO: 7515

SEQ ID NO: 217623 - DNA, 643 bp, Canis familiaris; identical to SEQ ID NO: 7516

SEQ ID NO: 217624 - DNA, 662 bp, Canis familiaris; identical to SEQ ID NO: 7517

SEQ ID NO: 217625 - DNA, 493 bp, Canis familiaris; identical to SEQ ID NO: 7518

SEQ ID NO: 217626 - DNA, 483 bp, Canis familiaris; identical to SEQ ID NO: 7519

SEQ ID NO: 217627 - DNA, 469 bp, Canis familiaris; identical to SEQ ID NO: 7520
  misc_feature (22)..(22): n is a, c, g, or t

SEQ ID NO: 217628 - DNA, 536 bp, Canis familiaris; identical to SEQ ID NO: 7521

SEQ ID NO: 217629 - DNA, 645 bp, Canis familiaris; identical to SEQ ID NO: 7522

SEQ ID NO: 217630 - DNA, 527 bp, Canis familiaris; identical to SEQ ID NO: 7523

SEQ ID NO: 217631 - DNA, 585 bp, Canis familiaris; identical to SEQ ID NO: 7524

SEQ ID NO: 217632 - DNA, 685 bp, Canis familiaris; identical to SEQ ID NO: 7525

SEQ ID NO: 217633 - DNA, 641 bp, Canis familiaris; identical to SEQ ID NO: 7526
  misc_feature (29)..(29): n is a, c, g, or t
  misc_feature (105)..(105): n is a, c, g, or t

SEQ ID NO: 217634 - DNA, 313 bp, Canis familiaris; identical to SEQ ID NO: 7527

SEQ ID NO: 217635 - DNA, 417 bp, Canis familiaris; identical to SEQ ID NO: 7528

SEQ ID NO: 217636 - DNA, 601 bp, Canis familiaris; identical to SEQ ID NO: 7529

SEQ ID NO: 217637 - DNA, 613 bp, Canis familiaris; identical to SEQ ID NO: 7530

SEQ ID NO: 217638 - DNA, 459 bp, Canis familiaris; identical to SEQ ID NO: 7531
  misc_feature (19)..(19): n is a, c, g, or t

SEQ ID NO: 217639 - DNA, 327 bp, Canis familiaris; identical to SEQ ID NO: 7532

SEQ ID NO: 217640 - DNA, 531 bp, Canis familiaris; identical to SEQ ID NO: 7533

SEQ ID NO: 217641 - DNA, 566 bp, Canis familiaris; identical to SEQ ID NO: 7534
  misc_feature (139)..(139): n is a, c, g, or t

SEQ ID NO: 217642 - DNA, 535 bp, Canis familiaris; identical to SEQ ID NO: 7535

SEQ ID NO: 217643 - DNA, 223 bp, Canis familiaris; identical to SEQ ID NO: 7536

SEQ ID NO: 217644 - DNA, 614 bp, Canis familiaris; identical to SEQ ID NO: 7537

SEQ ID NO: 217645 - DNA, 573 bp, Canis familiaris; identical to SEQ ID NO: 7538

SEQ ID NO: 217646 - DNA, 549 bp, Canis familiaris; identical to SEQ ID NO: 7539

SEQ ID NO: 217647 - DNA, 529 bp, Canis familiaris; identical to SEQ ID NO: 7540

SEQ ID NO: 217648 - DNA, 634 bp, Canis familiaris; identical to SEQ ID NO: 7541

SEQ ID NO: 217649 - DNA, 610 bp, Canis familiaris; identical to SEQ ID NO: 7542

SEQ ID NO: 217650 - DNA, 599 bp, Canis familiaris; identical to SEQ ID NO: 7543

SEQ ID NO: 217651 - DNA, 675 bp, Canis familiaris; identical to SEQ ID NO: 7544

SEQ ID NO: 217652 - DNA, 616 bp, Canis familiaris; identical to SEQ ID NO: 7545
  misc_feature (1)..(1): n is a, c, g, or t

SEQ ID NO: 217653 - DNA, 680 bp, Canis familiaris; identical to SEQ ID NO: 7546

SEQ ID NO: 217654 - DNA, 651 bp, Canis familiaris; identical to SEQ ID NO: 7547
  misc_feature (440)..(440): n is a, c, g, or t

SEQ ID NO: 217655 - DNA, 596 bp, Canis familiaris; identical to SEQ ID NO: 7548

SEQ ID NO: 217656 - DNA, 584 bp, Canis familiaris; identical to SEQ ID NO: 7549

SEQ ID NO: 217657 - DNA, 603 bp, Canis familiaris; identical to SEQ ID NO: 7550

SEQ ID NO: 217658 - DNA, 580 bp, Canis familiaris; identical to SEQ ID NO: 7551

SEQ ID NO: 217659 - DNA, 456 bp, Canis familiaris; identical to SEQ ID NO: 7552

SEQ ID NO: 217660 - DNA, 659 bp, Canis familiaris; identical to SEQ ID NO: 7553
  misc_feature (234)..(236): n is a, c, g, or t

SEQ ID NO: 217661 - DNA, 644 bp, Canis familiaris; identical to SEQ ID NO: 7554

SEQ ID NO: 217662 - DNA, 617 bp, Canis familiaris; identical to SEQ ID NO: 7555

SEQ ID NO: 217663 - DNA, 546 bp, Canis familiaris; identical to SEQ ID NO: 7556

SEQ ID NO: 217664 - DNA, 610 bp, Canis familiaris; identical to SEQ ID NO: 7557

SEQ ID NO: 217665 - DNA, 578 bp, Canis familiaris; identical to SEQ ID NO: 7558

SEQ ID NO: 217666 - DNA, 514 bp, Canis familiaris; identical to SEQ ID NO: 7559

SEQ ID NO: 217667 - DNA, 656 bp, Canis familiaris; identical to SEQ ID NO: 7560

SEQ ID NO: 217668 - DNA, 638 bp, Canis familiaris; identical to SEQ ID NO: 7561

SEQ ID NO: 217669 - DNA, 562 bp, Canis familiaris; identical to SEQ ID NO: 7562

SEQ ID NO: 217670 - DNA, 656 bp, Canis familiaris; identical to SEQ ID NO: 7563

SEQ ID NO: 217671 - DNA, 475 bp, Canis familiaris; identical to SEQ ID NO: 7564

SEQ ID NO: 217672 - DNA, 267 bp, Canis familiaris; identical to SEQ ID NO: 7565

SEQ ID NO: 217673 - DNA, 299 bp, Canis familiaris; identical to SEQ ID NO: 7566

SEQ ID NO: 217674 - DNA, 633 bp, Canis familiaris; identical to SEQ ID NO: 7567
  misc_feature (39)..(39): n is a, c, g, or t

SEQ ID NO: 217675 - DNA, 525 bp, Canis familiaris; identical to SEQ ID NO: 7568

SEQ ID NO: 217676 - DNA, 584 bp, Canis familiaris; identical to SEQ ID NO: 7569

SEQ ID NO: 217677 - DNA, 567 bp, Canis familiaris; identical to SEQ ID NO: 7570

SEQ ID NO: 217678 - DNA, 654 bp, Canis familiaris; identical to SEQ ID NO: 7571

SEQ ID NO: 217679 - DNA, 581 bp, Canis familiaris; identical to SEQ ID NO: 7572

SEQ ID NO: 217680 - DNA, 587 bp, Canis familiaris; identical to SEQ ID NO: 7573

SEQ ID NO: 217681 - DNA, 629 bp, Canis familiaris; identical to SEQ ID NO: 7574

SEQ ID NO: 217682 - DNA, 646 bp, Canis familiaris; identical to SEQ ID NO: 7575

SEQ ID NO: 217683 - DNA, 474 bp, Canis familiaris; identical to SEQ ID NO: 7576

SEQ ID NO: 217684 - DNA, 544 bp, Canis familiaris; identical to SEQ ID NO: 7577

SEQ ID NO: 217685 - DNA, 574 bp, Canis familiaris; identical to SEQ ID NO: 7578

SEQ ID NO: 217686 - DNA, 663 bp, Canis familiaris; identical to SEQ ID NO: 7579

SEQ ID NO: 217687 - DNA, 610 bp, Canis familiaris; identical to SEQ ID NO: 7580

SEQ ID NO: 217688 - DNA, 619 bp, Canis familiaris; identical to SEQ ID NO: 7581

SEQ ID NO: 217689 - DNA, 601 bp, Canis familiaris; identical to SEQ ID NO: 7582

SEQ ID NO: 217690 - DNA, 622 bp, Canis familiaris; identical to SEQ ID NO: 7583

SEQ ID NO: 217691 - DNA, 627 bp, Canis familiaris; identical to SEQ ID NO: 7584
  misc_feature (40)..(40): n is a, c, g, or t

SEQ ID NO: 217692 - DNA, 99 bp, Canis familiaris; identical to SEQ ID NO: 7585

SEQ ID NO: 217693 - DNA, 665 bp, Canis familiaris; identical to SEQ ID NO: 7586
  misc_feature (46)..(46): n is a, c, g, or t

SEQ ID NO: 217694 - DNA, 583 bp, Canis familiaris; identical to SEQ ID NO: 7587

SEQ ID NO: 217695 - DNA, 603 bp, Canis familiaris; identical to SEQ ID NO: 7588

SEQ ID NO: 217696 - DNA, 615 bp, Canis familiaris; identical to SEQ ID NO: 7589
  misc_feature (237)..(237): n is a, c, g, or t

SEQ ID NO: 217697 - DNA, 692 bp, Canis familiaris; identical to SEQ ID NO: 7590

SEQ ID NO: 217698 - DNA, 622 bp, Canis familiaris; identical to SEQ ID NO: 7591

SEQ ID NO: 217699 - DNA, 373 bp, Canis familiaris; identical to SEQ ID NO: 7592

SEQ ID NO: 217700 - DNA, 644 bp, Canis familiaris; identical to SEQ ID NO: 7593

SEQ ID NO: 217701 - DNA, 645 bp, Canis familiaris; identical to SEQ ID NO: 7594

SEQ ID NO: 217702 - DNA, 608 bp, Canis familiaris; identical to SEQ ID NO: 7595

SEQ ID NO: 217703 - DNA, 483 bp, Canis familiaris; identical to SEQ ID NO: 7596

SEQ ID NO: 217704 - DNA, 607 bp, Canis familiaris; identical to SEQ ID NO: 7597

SEQ ID NO: 217705 - DNA, 578 bp, Canis familiaris; identical to SEQ ID NO: 7598

SEQ ID NO: 217706 - DNA, 634 bp, Canis familiaris; identical to SEQ ID NO: 7599

SEQ ID NO: 217707 - DNA, 635 bp, Canis familiaris; identical to SEQ ID NO: 7600

SEQ ID NO: 217708 - DNA, 680 bp, Canis familiaris; identical to SEQ ID NO: 7601

SEQ ID NO: 217709 - DNA, 685 bp, Canis familiaris; identical to SEQ ID NO: 7602

SEQ ID NO: 217710 - DNA, 679 bp, Canis familiaris; identical to SEQ ID NO: 7603

SEQ ID NO: 217711 - DNA, 622 bp, Canis familiaris; identical to SEQ ID NO: 7604
  misc_feature (359)..(359): n is a, c, g, or t

SEQ ID NO: 217712 - DNA, 610 bp, Canis familiaris; identical to SEQ ID NO: 7605

SEQ ID NO: 217713 - DNA, 593 bp, Canis familiaris; identical to SEQ ID NO: 7606

SEQ ID NO: 217714 - DNA, 629 bp, Canis familiaris; identical to SEQ ID NO: 7607

SEQ ID NO: 217715 - DNA, 649 bp, Canis familiaris; identical to SEQ ID NO: 7608

SEQ ID NO: 217716 - DNA, 708 bp, Canis familiaris; identical to SEQ ID NO: 7609

SEQ ID NO: 217717 - DNA, 425 bp, Canis familiaris; identical to SEQ ID NO: 7610

SEQ ID NO: 217718 - DNA, 616 bp, Canis familiaris; identical to SEQ ID NO: 7611

SEQ ID NO: 217719 - DNA, 639 bp, Canis familiaris; identical to SEQ ID NO: 7612

SEQ ID NO: 217720 - DNA, 614 bp, Canis familiaris; identical to SEQ ID NO: 7613

SEQ ID NO: 217721 - DNA, 699 bp, Canis familiaris; identical to SEQ ID NO: 7614

SEQ ID NO: 217722 - DNA, 664 bp, Canis familiaris; identical to SEQ ID NO: 7615
  misc_feature (28)..(28): n is a, c, g, or t

SEQ ID NO: 217723 - DNA, 589 bp, Canis familiaris; identical to SEQ ID NO: 7616

SEQ ID NO: 217724 - DNA, 622 bp, Canis familiaris; identical to SEQ ID NO: 7617

SEQ ID NO: 217725 - DNA, 499 bp, Canis familiaris; identical to SEQ ID NO: 7618

SEQ ID NO: 217726 - DNA, 664 bp, Canis familiaris; identical to SEQ ID NO: 7619

SEQ ID NO: 217727 - DNA, 631 bp, Canis familiaris; identical to SEQ ID NO: 7620
  misc_feature (382)..(382): n is a, c, g, or t

SEQ ID NO: 217728 - DNA, 173 bp, Canis familiaris; identical to SEQ ID NO: 7621

SEQ ID NO: 217729 - DNA, 586 bp, Canis familiaris; identical to SEQ ID NO: 7622

SEQ ID NO: 217730 - DNA, 551 bp, Canis familiaris; identical to SEQ ID NO: 7623

SEQ ID NO: 217731 - DNA, 709 bp, Canis familiaris; identical to SEQ ID NO: 7624

SEQ ID NO: 217732 - DNA, 689 bp, Canis familiaris; identical to SEQ ID NO: 7625

SEQ ID NO: 217733 - DNA, 671 bp, Canis familiaris; identical to SEQ ID NO: 7626
  misc_feature (1)..(1): n is a, c, g, or t
  misc_feature (152)..(152): n is a, c, g, or t

SEQ ID NO: 217734 - DNA, 625 bp, Canis familiaris; identical to SEQ ID NO: 7627

SEQ ID NO: 217735 - DNA, 614 bp, Canis familiaris; identical to SEQ ID NO: 7628

SEQ ID NO: 217736 - DNA, 616 bp, Canis familiaris; identical to SEQ ID NO: 7629

SEQ ID NO: 217737 - DNA, 680 bp, Canis familiaris; identical to SEQ ID NO: 7630

SEQ ID NO: 217738 - DNA, 471 bp, Canis familiaris; identical to SEQ ID NO: 7631

SEQ ID NO: 217739 - DNA, 430 bp, Canis familiaris; identical to SEQ ID NO: 7632
  misc_feature (29)..(29): n is a, c, g, or t

SEQ ID NO: 217740 - DNA, 605 bp, Canis familiaris; identical to SEQ ID NO: 7633

SEQ ID NO: 217741 - DNA, 586 bp, Canis familiaris; identical to SEQ ID NO: 7634

SEQ ID NO: 217742 - DNA, 667 bp, Canis familiaris; identical to SEQ ID NO: 7635

SEQ ID NO: 217743 - DNA, 504 bp, Canis familiaris; identical to SEQ ID NO: 7636

SEQ ID NO: 217744 - DNA, 606 bp, Canis familiaris; identical to SEQ ID NO: 7637

SEQ ID NO: 217745 - DNA, 669 bp, Canis familiaris; identical to SEQ ID NO: 7638

SEQ ID NO: 217746 - DNA, 490 bp, Canis familiaris; identical to SEQ ID NO: 7639
  misc_feature (1)..(1): n is a, c, g, or t
  misc_feature (171)..(172): n is a, c, g, or t
  misc_feature (185)..(185): n is a, c, g, or t
  misc_feature (198)..(199): n is a, c, g, or t
  misc_feature (205)..(205): n is a, c, g, or t

SEQ ID NO: 217747 - DNA, 654 bp, Canis familiaris; identical to SEQ ID NO: 7640

SEQ ID NO: 217748 - DNA, 674 bp, Canis familiaris; identical to SEQ ID NO: 7641
  misc_feature (136)..(136): n is a, c, g, or t

SEQ ID NO: 217749 - DNA, 605 bp, Canis familiaris; identical to SEQ ID NO: 7642

SEQ ID NO: 217750 - DNA, 585 bp, Canis familiaris; identical to SEQ ID NO: 7643

SEQ ID NO: 217751 - DNA, 560 bp, Canis familiaris; identical to SEQ ID NO: 7644

SEQ ID NO: 217752 - DNA, 621 bp, Canis familiaris; identical to SEQ ID NO: 7645

SEQ ID NO: 217753 - DNA, 652 bp, Canis familiaris; identical to SEQ ID NO: 7646

SEQ ID NO: 217754 - DNA, 417 bp, Canis familiaris; identical to SEQ ID NO: 7647
  misc_feature (30)..(30): n is a, c, g, or t

SEQ ID NO: 217755 - DNA, 497 bp, Canis familiaris; identical to SEQ ID NO: 7648

SEQ ID NO: 217756 - DNA, 550 bp, Canis familiaris; identical to SEQ ID NO: 7649

SEQ ID NO: 217757 - DNA, 162 bp, Canis familiaris; identical to SEQ ID NO: 7650
  misc_feature (1)..(1): n is a, c, g, or t

SEQ ID NO: 217758 - DNA, 141 bp, Canis familiaris; identical to SEQ ID NO: 7651

SEQ ID NO: 217759 - DNA, 458 bp, Canis familiaris; identical to SEQ ID NO: 7652

SEQ ID NO: 217760 - DNA, 248 bp, Canis familiaris; identical to SEQ ID NO: 7653

SEQ ID NO: 217761 - DNA, 490 bp, Canis familiaris; identical to SEQ ID NO: 7654

SEQ ID NO: 217762 - DNA, 438 bp, Canis familiaris; identical to SEQ ID NO: 7655

SEQ ID NO: 217763 - DNA, 431 bp, Canis familiaris; identical to SEQ ID NO: 7656

SEQ ID NO: 217764 - DNA, 443 bp, Canis familiaris; identical to SEQ ID NO: 7657

SEQ ID NO: 217765 - DNA, 488 bp, Canis familiaris; identical to SEQ ID NO: 7658

SEQ ID NO: 217766 - DNA, 498 bp, Canis familiaris; identical to SEQ ID NO: 7659

SEQ ID NO: 217767 - DNA, 650 bp, Canis familiaris; identical to SEQ ID NO: 7660

SEQ ID NO: 217768 - DNA, 557 bp, Canis familiaris; identical to SEQ ID NO: 7661

SEQ ID NO: 217769 - DNA, 575 bp, Canis familiaris; identical to SEQ ID NO: 7662

SEQ ID NO: 217770 - DNA, 333 bp, Canis familiaris; identical to SEQ ID NO: 7663

SEQ ID NO: 217771 - DNA, 607 bp, Canis familiaris; identical to SEQ ID NO: 7664

SEQ ID NO: 217772 - DNA, 537 bp, Canis familiaris; identical to SEQ ID NO: 7665

SEQ ID NO: 217773 - DNA, 604 bp, Canis familiaris; identical to SEQ ID NO: 7666

SEQ ID NO: 217774 - DNA, 617 bp, Canis familiaris; identical to SEQ ID NO: 7667

SEQ ID NO: 217775 - DNA, 596 bp, Canis familiaris; identical to SEQ ID NO: 7668

SEQ ID NO: 217776 - DNA, 630 bp, Canis familiaris; identical to SEQ ID NO: 7669

SEQ ID NO: 217777 - DNA, 657 bp, Canis familiaris; identical to SEQ ID NO: 7670

SEQ ID NO: 217778 - DNA, 692 bp, Canis familiaris; identical to SEQ ID NO: 7671

SEQ ID NO: 217779 - DNA, 596 bp, Canis familiaris; identical to SEQ ID NO: 7672

SEQ ID NO: 217780 - DNA, 532 bp, Canis familiaris; identical to SEQ ID NO: 7673

SEQ ID NO: 217781 - DNA, 603 bp, Canis familiaris; identical to SEQ ID NO: 7674

SEQ ID NO: 217782 - DNA, 622 bp, Canis familiaris; identical to SEQ ID NO: 7675

SEQ ID NO: 217783 - DNA, 681 bp, Canis familiaris; identical to SEQ ID NO: 7676

SEQ ID NO: 217784 - DNA, 672 bp, Canis familiaris; identical to SEQ ID NO: 7677
  misc_feature (107)..(107): n is a, c, g, or t

SEQ ID NO: 217785 - DNA, 566 bp, Canis familiaris; identical to SEQ ID NO: 7678

SEQ ID NO: 217786 - DNA, 483 bp, Canis familiaris; identical to SEQ ID NO: 7679

SEQ ID NO: 217787 - DNA, 590 bp, Canis familiaris; identical to SEQ ID NO: 7680

SEQ ID NO: 217788 - DNA, 717 bp, Canis familiaris; identical to SEQ ID NO: 7681

SEQ ID NO: 217789 - DNA, 535 bp, Canis familiaris; identical to SEQ ID NO: 7682

SEQ ID NO: 217790 - DNA, 544 bp, Canis familiaris; identical to SEQ ID NO: 7683

SEQ ID NO: 217791 - DNA, 678 bp, Canis familiaris; identical to SEQ ID NO: 7684

SEQ ID NO: 217792 - DNA, 576 bp, Canis familiaris; identical to SEQ ID NO: 7685

SEQ ID NO: 217793 - DNA, 621 bp, Canis familiaris; identical to SEQ ID NO: 7686

SEQ ID NO: 217794 - DNA, 661 bp, Canis familiaris; identical to SEQ ID NO: 7687

SEQ ID NO: 217795 - DNA, 642 bp, Canis familiaris; identical to SEQ ID NO: 7688

SEQ ID NO: 217796 - DNA, 500 bp, Canis familiaris; identical to SEQ ID NO: 7689

SEQ ID NO: 217797 - DNA, 635 bp, Canis familiaris; identical to SEQ ID NO: 7690

SEQ ID NO: 217798 - DNA, 495 bp, Canis familiaris; identical to SEQ ID NO: 7691

SEQ ID NO: 217799 - DNA, 570 bp, Canis familiaris; identical to SEQ ID NO: 7692

SEQ ID NO: 217800 - DNA, 544 bp, Canis familiaris; identical to SEQ ID NO: 7693

SEQ ID NO: 217801 - DNA, 597 bp, Canis familiaris; identical to SEQ ID NO: 7694

SEQ ID NO: 217802 - DNA, 402 bp, Canis familiaris; identical to SEQ ID NO: 7695

SEQ ID NO: 217803 - DNA, 649 bp, Canis familiaris; identical to SEQ ID NO: 7696

SEQ ID NO: 217804 - DNA, 579 bp, Canis familiaris; identical to SEQ ID NO: 7697

SEQ ID NO: 217805 - DNA, 508 bp, Canis familiaris; identical to SEQ ID NO: 7698

SEQ ID NO: 217806 - DNA, 625 bp, Canis familiaris; identical to SEQ ID NO: 7699

SEQ ID NO: 217807 - DNA, 676 bp, Canis familiaris; identical to SEQ ID NO: 7700

SEQ ID NO: 217808 - DNA, 564 bp, Canis familiaris; identical to SEQ ID NO: 7701
  misc_feature (150)..(150): n is a, c, g, or t

SEQ ID NO: 217809 - DNA, 640 bp, Canis familiaris; identical to SEQ ID NO: 7702

SEQ ID NO: 217810 - DNA, 101 bp, Canis familiaris; identical to SEQ ID NO: 7703

SEQ ID NO: 217811 - DNA, 465 bp, Canis familiaris; identical to SEQ ID NO: 7704

SEQ ID NO: 217812 - DNA, 520 bp, Canis familiaris; identical to SEQ ID NO: 7705
  misc_feature (94)..(94): n is a, c, g, or t

SEQ ID NO: 217813 - DNA, 605 bp, Canis familiaris; identical to SEQ ID NO: 7706

SEQ ID NO: 217814 - DNA, 604 bp, Canis familiaris; identical to SEQ ID NO: 7707
  misc_feature (1)..(1): n is a, c, g, or t
  misc_feature (113)..(113): n is a, c, g, or t

SEQ ID NO: 217815 - DNA, 589 bp, Canis familiaris; identical to SEQ ID NO: 7708
  misc_feature (326)..(327): n is a, c, g, or t

SEQ ID NO: 217816 - DNA, 555 bp, Canis familiaris; identical to SEQ ID NO: 7709

SEQ ID NO: 217817 - DNA, 625 bp, Canis familiaris; identical to SEQ ID NO: 7710
  misc_feature (50)..(50): n is a, c, g, or t

SEQ ID NO: 217818 - DNA, 582 bp, Canis familiaris; identical to SEQ ID NO: 7711
  misc_feature (60)..(60): n is a, c, g, or t

SEQ ID NO: 217819 - DNA, 603 bp, Canis familiaris; identical to SEQ ID NO: 7712

SEQ ID NO: 217820 - DNA, 684 bp, Canis familiaris; identical to SEQ ID NO: 7713
  misc_feature (407)..(407): n is a, c, g, or t

SEQ ID NO: 217821 - DNA, 437 bp, Canis familiaris; identical to SEQ ID NO: 7714
  misc_feature (41)..(41): n is a, c, g, or t
  misc_feature (66)..(67): n is a, c, g, or t
  misc_feature (84)..(85): n is a, c, g, or t
  misc_feature (87)..(87): n is a, c, g, or t
  misc_feature (99)..(99): n is a, c, g, or t

SEQ ID NO: 217822 - DNA, 235 bp, Canis familiaris; identical to SEQ ID NO: 7715
  misc_feature (31)..(31): n is a, c, g, or t

SEQ ID NO: 217823 - DNA, 682 bp, Canis familiaris; identical to SEQ ID NO: 7716

SEQ ID NO: 217824 - DNA, 674 bp, Canis familiaris; identical to SEQ ID NO: 7717

SEQ ID NO: 217825 - DNA, 588 bp, Canis familiaris; identical to SEQ ID NO: 7718

SEQ ID NO: 217826 - DNA, 632 bp, Canis familiaris; identical to SEQ ID NO: 7719

SEQ ID NO: 217827 - DNA, 501 bp, Canis familiaris; identical to SEQ ID NO: 7720

SEQ ID NO: 217828 - DNA, 558 bp, Canis familiaris; identical to SEQ ID NO: 7721

SEQ ID NO: 217829 - DNA, 545 bp, Canis familiaris; identical to SEQ ID NO: 7722
  misc_feature (1)..(1): n is a, c, g, or t

SEQ ID NO: 217830 - DNA, 580 bp, Canis familiaris; identical to SEQ ID NO: 7723

SEQ ID NO: 217831 - DNA, 484 bp, Canis familiaris; identical to SEQ ID NO: 7724

SEQ ID NO: 217832 - DNA, 619 bp, Canis familiaris; identical to SEQ ID NO: 7725
  misc_feature (1)..(1): n is a, c, g, or t
  misc_feature (89)..(89): n is a, c, g, or t

SEQ ID NO: 217833 - DNA, 607 bp, Canis familiaris; identical to SEQ ID NO: 7726

SEQ ID NO: 217834 - DNA, 402 bp, Canis familiaris; identical to SEQ ID NO: 7727

SEQ ID NO: 217835 - DNA, 669 bp, Canis familiaris; identical to SEQ ID NO: 7728
  misc_feature (1)..(1): n is a, c, g, or t

SEQ ID NO: 217836 - DNA, 620 bp, Canis familiaris; identical to SEQ ID NO: 7729
  misc_feature (80)..(80): n is a, c, g, or t

SEQ ID NO: 217837 - DNA, 583 bp, Canis familiaris; identical to SEQ ID NO: 7730

SEQ ID NO: 217838 - DNA, 623 bp, Canis familiaris; identical to SEQ ID NO: 7731

SEQ ID NO: 217839 - DNA, 578 bp, Canis familiaris; identical to SEQ ID NO: 7732

SEQ ID NO: 217840 - DNA, 114 bp, Canis familiaris; identical to SEQ ID NO: 7733

SEQ ID NO: 217841 - DNA, 135 bp, Canis familiaris; identical to SEQ ID NO: 7734

SEQ ID NO: 217842 - DNA, 663 bp, Canis familiaris; identical to SEQ ID NO: 7735

SEQ ID NO: 217843 - DNA, 606 bp, Canis familiaris; identical to SEQ ID NO: 7736

SEQ ID NO: 217844 - DNA, 626 bp, Canis familiaris; identical to SEQ ID NO: 7737

SEQ ID NO: 217845 - DNA, 670 bp, Canis familiaris; identical to SEQ ID NO: 7738

SEQ ID NO: 217846 - DNA, 624 bp, Canis familiaris; identical to SEQ ID NO: 7739
  misc_feature (22)..(22): n is a, c, g, or t

SEQ ID NO: 217847 - DNA, 477 bp, Canis familiaris; identical to SEQ ID NO: 7740

SEQ ID NO: 217848 - DNA, 653 bp, Canis familiaris; identical to SEQ ID NO: 7741

SEQ ID NO: 217849 - DNA, 554 bp, Canis familiaris; identical to SEQ ID NO: 7742
  misc_feature (1)..(1): n is a, c, g, or t

SEQ ID NO: 217850 - DNA, 607 bp, Canis familiaris; identical to SEQ ID NO: 7743

SEQ ID NO: 217851 - DNA, 497 bp, Canis familiaris; identical to SEQ ID NO: 7744
  misc_feature (1)..(1): n is a, c, g, or t

SEQ ID NO: 217852 - DNA, 593 bp, Canis familiaris; identical to SEQ ID NO: 7745
  misc_feature (179)..(179): n is a, c, g, or t
  misc_feature (186)..(186): n is a, c, g, or t

SEQ ID NO: 217853 - DNA, 556 bp, Canis familiaris; identical to SEQ ID NO: 7746

SEQ ID NO: 217854 - DNA, 567 bp, Canis familiaris; identical to SEQ ID NO: 7747

SEQ ID NO: 217855 - DNA, 622 bp, Canis familiaris; identical to SEQ ID NO: 7748

SEQ ID NO: 217856 - DNA, 611 bp, Canis familiaris; identical to SEQ ID NO: 7749
  misc_feature (53)..(53): n is a, c, g, or t

SEQ ID NO: 217857 - DNA, 567 bp, Canis familiaris; identical to SEQ ID NO: 7750

SEQ ID NO: 217858 - DNA, 579 bp, Canis familiaris; identical to SEQ ID NO: 7751

SEQ ID NO: 217859 - DNA, 604 bp, Canis familiaris; identical to SEQ ID NO: 7752

SEQ ID NO: 217860 - DNA, 598 bp, Canis familiaris; identical to SEQ ID NO: 7753

SEQ ID NO: 217861 - DNA, 499 bp, Canis familiaris; identical to SEQ ID NO: 7754

SEQ ID NO: 217862 - DNA, 586 bp, Canis familiaris; identical to SEQ ID NO: 7755

SEQ ID NO: 217863 - DNA, 380 bp, Canis familiaris; identical to SEQ ID NO: 7756

SEQ ID NO: 217864 - DNA, 602 bp, Canis familiaris; identical to SEQ ID NO: 7757

SEQ ID NO: 217865 - DNA, 644 bp, Canis familiaris; identical to SEQ ID NO: 7758

SEQ ID NO: 217866 - DNA, 605 bp, Canis familiaris; identical to SEQ ID NO: 7759

SEQ ID NO: 217867 - DNA, 264 bp, Canis familiaris; identical to SEQ ID NO: 7760

SEQ ID NO: 217868 - DNA, 619 bp, Canis familiaris; identical to SEQ ID NO: 7761

SEQ ID NO: 217869 - DNA, 575 bp, Canis familiaris; identical to SEQ ID NO: 7762

SEQ ID NO: 217870 - DNA, 477 bp, Canis familiaris; identical to SEQ ID NO: 7763

SEQ ID NO: 217871 - DNA, 610 bp, Canis familiaris; identical to SEQ ID NO: 7764

SEQ ID NO: 217872 - DNA, 571 bp, Canis familiaris; identical to SEQ ID NO: 7765

SEQ ID NO: 217873 - DNA, 594 bp, Canis familiaris; identical to SEQ ID NO: 7766

SEQ ID NO: 217874 - DNA, 621 bp, Canis familiaris; identical to SEQ ID NO: 7767
  misc_feature (68)..(68): n is a, c, g, or t

SEQ ID NO: 217875 - DNA, 626 bp, Canis familiaris; identical to SEQ ID NO: 7768

SEQ ID NO: 217876 - DNA, 355 bp, Canis familiaris; identical to SEQ ID NO: 7769
  misc_feature (59)..(60): n is a, c, g, or t
  misc_feature (90)..(91): n is a, c, g, or t

SEQ ID NO: 217877 - DNA, 595 bp, Canis familiaris; identical to SEQ ID NO: 7770
  misc_feature (34)..(34): n is a, c, g, or t

SEQ ID NO: 217878 - DNA, 479 bp, Canis familiaris; identical to SEQ ID NO: 7771

SEQ ID NO: 217879 - DNA, 573 bp, Canis familiaris; identical to SEQ ID NO: 7772
  misc_feature (1)..(1): n is a, c, g, or t

SEQ ID NO: 217880 - DNA, 625 bp, Canis familiaris; identical to SEQ ID NO: 7773

SEQ ID NO: 217881 - DNA, 637 bp, Canis familiaris; identical to SEQ ID NO: 7774
  misc_feature (486)..(486): n is a, c, g, or t

SEQ ID NO: 217882 - DNA, 646 bp, Canis familiaris; identical to SEQ ID NO: 7775

SEQ ID NO: 217883 - DNA, 136 bp, Canis familiaris; identical to SEQ ID NO: 7776

SEQ ID NO: 217884 - DNA, 684 bp, Canis familiaris; identical to SEQ ID NO: 7777
  misc_feature (38)..(38): n is a, c, g, or t

SEQ ID NO: 217885 - DNA, 615 bp, Canis familiaris; identical to SEQ ID NO: 7778

SEQ ID NO: 217886 - DNA, 657 bp, Canis familiaris; identical to SEQ ID NO: 7779

SEQ ID NO: 217887 - DNA, 612 bp, Canis familiaris; identical to SEQ ID NO: 7780
  misc_feature (67)..(67): n is a, c, g, or t

SEQ ID NO: 217888 - DNA, 616 bp, Canis familiaris; identical to SEQ ID NO: 7781

SEQ ID NO: 217889 - DNA, 597 bp, Canis familiaris; identical to SEQ ID NO: 7782

SEQ ID NO: 217890 - DNA, 565 bp, Canis familiaris; identical to SEQ ID NO: 7783

SEQ ID NO: 217891 - DNA, 608 bp, Canis familiaris; identical to SEQ ID NO: 7784

SEQ ID NO: 217892 - DNA, 449 bp, Canis familiaris; identical to SEQ ID NO: 7785

SEQ ID NO: 217893 - DNA, 247 bp, Canis familiaris; identical to SEQ ID NO: 7786

SEQ ID NO: 217894 - DNA, 613 bp, Canis familiaris; identical to SEQ ID NO: 7787

SEQ ID NO: 217895 - DNA, 625 bp, Canis familiaris; identical to SEQ ID NO: 7788

SEQ ID NO: 217896 - DNA, 634 bp, Canis familiaris; identical to SEQ ID NO: 7789
  misc_feature (81)..(81): n is a, c, g, or t

SEQ ID NO: 217897 - DNA, 432 bp, Canis familiaris; identical to SEQ ID NO: 7790

SEQ ID NO: 217898 - DNA, 631 bp, Canis familiaris; identical to SEQ ID NO: 7791

SEQ ID NO: 217899 - DNA, 613 bp, Canis familiaris; identical to SEQ ID NO: 7792

SEQ ID NO: 217900 - DNA, 682 bp, Canis familiaris; identical to SEQ ID NO: 7793

SEQ ID NO: 217901 - DNA, 589 bp, Canis familiaris; identical to SEQ ID NO: 7794

SEQ ID NO: 217902 - DNA, 630 bp, Canis familiaris; identical to SEQ ID NO: 7795

SEQ ID NO: 217903 - DNA, 620 bp, Canis familiaris; identical to SEQ ID NO: 7796

SEQ ID NO: 217904 - DNA, 612 bp, Canis familiaris; identical to SEQ ID NO: 7797

SEQ ID NO: 217905 - DNA, 664 bp, Canis familiaris; identical to SEQ ID NO: 7798

SEQ ID NO: 217906 - DNA, 626 bp, Canis familiaris; identical to SEQ ID NO: 7799

SEQ ID NO: 217907 - DNA, 685 bp, Canis familiaris; identical to SEQ ID NO: 7800

SEQ ID NO: 217908 - DNA, 463 bp, Canis familiaris; identical to SEQ ID NO: 7801
  misc_feature (1)..(1): n is a, c, g, or t

SEQ ID NO: 217909 - DNA, 501 bp, Canis familiaris; identical to SEQ ID NO: 7802

SEQ ID NO: 217910 - DNA, 445 bp, Canis familiaris; identical to SEQ ID NO: 7803

SEQ ID NO: 217911 - DNA, 640 bp, Canis familiaris; identical to SEQ ID NO: 7804

SEQ ID NO: 217912 - DNA, 434 bp, Canis familiaris; identical to SEQ ID NO: 7805

SEQ ID NO: 217913 - DNA, 600 bp, Canis familiaris; identical to SEQ ID NO: 7806

SEQ ID NO: 217914 - DNA, 532 bp, Canis familiaris; identical to SEQ ID NO: 7807

SEQ ID NO: 217915 - DNA, 637 bp, Canis familiaris; identical to SEQ ID NO: 7808

SEQ ID NO: 217916 - DNA, 602 bp, Canis familiaris; identical to SEQ ID NO: 7809

SEQ ID NO: 217917 - DNA, 633 bp, Canis familiaris; identical to SEQ ID NO: 7810

SEQ ID NO: 217918 - DNA, 614 bp, Canis familiaris; identical to SEQ ID NO: 7811

SEQ ID NO: 217919 - DNA, 592 bp, Canis familiaris; identical to SEQ ID NO: 7812

SEQ ID NO: 217920 - DNA, 639 bp, Canis familiaris; identical to SEQ ID NO: 7813

SEQ ID NO: 217921 - DNA, 378 bp, Canis familiaris; identical to SEQ ID NO: 7814

SEQ ID NO: 217922 - DNA, 496 bp, Canis familiaris; identical to SEQ ID NO: 7815

SEQ ID NO: 217923 - DNA, 627 bp, Canis familiaris; identical to SEQ ID NO: 7816

SEQ ID NO: 217924 - DNA, 555 bp, Canis familiaris; identical to SEQ ID NO: 7817

SEQ ID NO: 217925 - DNA, 606 bp, Canis familiaris; identical to SEQ ID NO: 7818

SEQ ID NO: 217926 - DNA, 481 bp, Canis familiaris; identical to SEQ ID NO: 7819

SEQ ID NO: 217927 - DNA, 615 bp, Canis familiaris; identical to SEQ ID NO: 7820

SEQ ID NO: 217928 - DNA, 607 bp, Canis familiaris; identical to SEQ ID NO: 7821

SEQ ID NO: 217929 - DNA, 645 bp, Canis familiaris; identical to SEQ ID NO: 7822

SEQ ID NO: 217930 - DNA, 666 bp, Canis familiaris; identical to SEQ ID NO: 7823

SEQ ID NO: 217931 - DNA, 643 bp, Canis familiaris; identical to SEQ ID NO: 7824

SEQ ID NO: 217932 - DNA, 605 bp, Canis familiaris; identical to SEQ ID NO: 7825

SEQ ID NO: 217933 - DNA, 575 bp, Canis familiaris; identical to SEQ ID NO: 7826

SEQ ID NO: 217934 - DNA, 357 bp, Canis familiaris; identical to SEQ ID NO: 7827

SEQ ID NO: 217935 - DNA, 636 bp, Canis familiaris; identical to SEQ ID NO: 7828

SEQ ID NO: 217936 - DNA, 635 bp, Canis familiaris; identical to SEQ ID NO: 7829
  misc_feature (61)..(61): n is a, c, g, or t

SEQ ID NO: 217937 - DNA, 587 bp, Canis familiaris; identical to SEQ ID NO: 7830
  misc_feature (54)..(55): n is a, c, g, or t
  misc_feature (68)..(69): n is a, c, g, or t
  misc_feature (79)..(81): n is a, c, g, or t
  misc_feature (108)..(108): n is a, c, g, or t
  misc_feature (115)..(115): n is a, c, g, or t
  misc_feature (142)..(143): n is a, c, g, or t
  misc_feature (158)..(159): n is a, c, g, or t
  misc_feature (165)..(165): n is a, c, g, or t
  misc_feature (178)..(179): n is a, c, g, or t
  misc_feature (181)..(181): n is a, c, g, or t
  misc_feature (192)..(193): n is a, c, g, or t
  misc_feature (198)..(198): n is a, c, g, or t

SEQ ID NO: 217938 - DNA, 584 bp, Canis familiaris; identical to SEQ ID NO: 7831

SEQ ID NO: 217939 - DNA, 618 bp, Canis familiaris; identical to SEQ ID NO: 7832

SEQ ID NO: 217940 - DNA, 416 bp, Canis familiaris; identical to SEQ ID NO: 7833
  misc_feature (1)..(1): n is a, c, g, or t

SEQ ID NO: 217941 - DNA, 642 bp, Canis familiaris; identical to SEQ ID NO: 7834

SEQ ID NO: 217942 - DNA, 248 bp, Canis familiaris; identical to SEQ ID NO: 7835

SEQ ID NO: 217943 - DNA, 600 bp, Canis familiaris; identical to SEQ ID NO: 7836

SEQ ID NO: 217944 - DNA, 708 bp, Canis familiaris; identical to SEQ ID NO: 7837

SEQ ID NO: 217945 - DNA, 577 bp, Canis familiaris; identical to SEQ ID NO: 7838

SEQ ID NO: 217946 - DNA, 567 bp, Canis familiaris; identical to SEQ ID NO: 7839
  misc_feature (1)..(1): n is a, c, g, or t

SEQ ID NO: 217947 - DNA, 390 bp, Canis familiaris; identical to SEQ ID NO: 7840

SEQ ID NO: 217948 - DNA, 634 bp, Canis familiaris; identical to SEQ ID NO: 7841

SEQ ID NO: 217949 - DNA, 609 bp, Canis familiaris; identical to SEQ ID NO: 7842

SEQ ID NO: 217950 - DNA, 544 bp, Canis familiaris; identical to SEQ ID NO: 7843

SEQ ID NO: 217951 - DNA, 573 bp, Canis familiaris; identical to SEQ ID NO: 7844

SEQ ID NO: 217952 - DNA, 613 bp, Canis familiaris; identical to SEQ ID NO: 7845

SEQ ID NO: 217953 - DNA, 619 bp, Canis familiaris; identical to SEQ ID NO: 7846

SEQ ID NO: 217954 - DNA, 667 bp, Canis familiaris; identical to SEQ ID NO: 7847

SEQ ID NO: 217955 - DNA, 560 bp, Canis familiaris; identical to SEQ ID NO: 7848

SEQ ID NO: 217956 - DNA, 614 bp, Canis familiaris; identical to SEQ ID NO: 7849

SEQ ID NO: 217957 - DNA, 511 bp, Canis familiaris; identical to SEQ ID NO: 7850
  misc_feature (1)..(1): n is a, c, g, or t

SEQ ID NO: 217958 - DNA, 622 bp, Canis familiaris; identical to SEQ ID NO: 7851

SEQ ID NO: 217959 - DNA, 600 bp, Canis familiaris; identical to SEQ ID NO: 7852

SEQ ID NO: 217960 - DNA, 557 bp, Canis familiaris; identical to SEQ ID NO: 7853

SEQ ID NO: 217961 - DNA, 634 bp, Canis familiaris; identical to SEQ ID NO: 7854
  misc_feature (23)..(23): n is a, c, g, or t
  misc_feature (362)..(362): n is a, c, g, or t

SEQ ID NO: 217962 - DNA, 689 bp, Canis familiaris; identical to SEQ ID NO: 7855

SEQ ID NO: 217963 - DNA, 612 bp, Canis familiaris; identical to SEQ ID NO: 7856
  misc_feature (1)..(1): n is a, c, g, or t

SEQ ID NO: 217964 - DNA, 667 bp, Canis familiaris; identical to SEQ ID NO: 7857

SEQ ID NO: 217965 - DNA, 647 bp, Canis familiaris; identical to SEQ ID NO: 7858

SEQ ID NO: 217966 - DNA, 549 bp, Canis familiaris; identical to SEQ ID NO: 7859
  misc_feature (1)..(1): n is a, c, g, or t

SEQ ID NO: 217967 - DNA, 694 bp, Canis familiaris; identical to SEQ ID NO: 7860

SEQ ID NO: 217968 - DNA, 609 bp, Canis familiaris; identical to SEQ ID NO: 7861

SEQ ID NO: 217969 - DNA, 638 bp, Canis familiaris; identical to SEQ ID NO: 7862

SEQ ID NO: 217970 - DNA, 623 bp, Canis familiaris; identical to SEQ ID NO: 7863

SEQ ID NO: 217971 - DNA, 639 bp, Canis familiaris; identical to SEQ ID NO: 7864

SEQ ID NO: 217972 - DNA, 614 bp, Canis familiaris; identical to SEQ ID NO: 7865

SEQ ID NO: 217973 - DNA, 587 bp, Canis familiaris; identical to SEQ ID NO: 7866

SEQ ID NO: 217974 - DNA, 697 bp, Canis familiaris; identical to SEQ ID NO: 7867

SEQ ID NO: 217975 - DNA, 608 bp, Canis familiaris; identical to SEQ ID NO: 7868

SEQ ID NO: 217976 - DNA, 652 bp, Canis familiaris; identical to SEQ ID NO: 7869

SEQ ID NO: 217977 - DNA, 530 bp, Canis familiaris; identical to SEQ ID NO: 7870

SEQ ID NO: 217978 - DNA, 557 bp, Canis familiaris; identical to SEQ ID NO: 7871

SEQ ID NO: 217979 - DNA, 541 bp, Canis familiaris; identical to SEQ ID NO: 7872

SEQ ID NO: 217980 - DNA, 506 bp, Canis familiaris; identical to SEQ ID NO: 7873
  misc_feature (1)..(1): n is a, c, g, or t

SEQ ID NO: 217981 - DNA, 558 bp, Canis familiaris; identical to SEQ ID NO: 7874

SEQ ID NO: 217982 - DNA, 575 bp, Canis familiaris; identical to SEQ ID NO: 7875
  misc_feature (1)..(1): n is a, c, g, or t

SEQ ID NO: 217983 - DNA, 577 bp, Canis familiaris; identical to SEQ ID NO: 7876

SEQ ID NO: 217984 - DNA, 466 bp, Canis familiaris; identical to SEQ ID NO: 7877

SEQ ID NO: 217985 - DNA, 508 bp, Canis familiaris; identical to SEQ ID NO: 7878

SEQ ID NO: 217986 - DNA, 490 bp, Canis familiaris; identical to SEQ ID NO: 7879

SEQ ID NO: 217987 - DNA, 606 bp, Canis familiaris; identical to SEQ ID NO: 7880

SEQ ID NO: 217988 - DNA, 544 bp, Canis familiaris; identical to SEQ ID NO: 7881

SEQ ID NO: 217989 - DNA, 583 bp, Canis familiaris; identical to SEQ ID NO: 7882

SEQ ID NO: 217990 - DNA, 118 bp, Canis familiaris; identical to SEQ ID NO: 7883

SEQ ID NO: 217991 - DNA, 649 bp, Canis familiaris; identical to SEQ ID NO: 7884

SEQ ID NO: 217992 - DNA, 614 bp, Canis familiaris; identical to SEQ ID NO: 7885

SEQ ID NO: 217993 - DNA, 567 bp, Canis familiaris; identical to SEQ ID NO: 7886

SEQ ID NO: 217994 - DNA, 613 bp, Canis familiaris; identical to SEQ ID NO: 7887

SEQ ID NO: 217995 - DNA, 633 bp, Canis familiaris; identical to SEQ ID NO: 7888

SEQ ID NO: 217996 - DNA, 673 bp, Canis familiaris; identical to SEQ ID NO: 7889

SEQ ID NO: 217997 - DNA, 619 bp, Canis familiaris; identical to SEQ ID NO: 7890
  misc_feature (59)..(60): n is a, c, g, or t
  misc_feature (63)..(63): n is a, c, g, or t
  misc_feature (98)..(98): n is a, c, g, or t

SEQ ID NO: 217998 - DNA, 721 bp, Canis familiaris; identical to SEQ ID NO: 7891

SEQ ID NO: 217999 - DNA, 702 bp, Canis familiaris; identical to SEQ ID NO: 7892
  misc_feature (1)..(1): n is a, c, g, or t

SEQ ID NO: 218000 - DNA, 547 bp, Canis familiaris; identical to SEQ ID NO: 7893
  misc_feature (1)..(1): n is a, c, g, or t

SEQ ID NO: 218001 - DNA, 639 bp, Canis familiaris; identical to SEQ ID NO: 7894

SEQ ID NO: 218002 - DNA, 586 bp, Canis familiaris; identical to SEQ ID NO: 7895

SEQ ID NO: 218003 - DNA, 573 bp, Canis familiaris; identical to SEQ ID NO: 7896
  misc_feature (429)..(429): n is a, c, g, or t

SEQ ID NO: 218004 - DNA, 717 bp, Canis familiaris; identical to SEQ ID NO: 7897
  misc_feature (138)..(138): n is a, c, g, or t

SEQ ID NO: 218005 - DNA, 628 bp, Canis familiaris; identical to SEQ ID NO: 7898

SEQ ID NO: 218006 - DNA, 655 bp, Canis familiaris; identical to SEQ ID NO: 7899

SEQ ID NO: 218007 - DNA, 612 bp, Canis familiaris; identical to SEQ ID NO: 7900
  misc_feature (84)..(84): n is a, c, g, or t

SEQ ID NO: 218008 - DNA, 630 bp, Canis familiaris; identical to SEQ ID NO: 7901

SEQ ID NO: 218009 - DNA, 614 bp, Canis familiaris; identical to SEQ ID NO: 7902

SEQ ID NO: 218010 - DNA, 597 bp, Canis familiaris; identical to SEQ ID NO: 7903

SEQ ID NO: 218011 - DNA, 651 bp, Canis familiaris; identical to SEQ ID NO: 7904

SEQ ID NO: 218012 - DNA, 559 bp, Canis familiaris; identical to SEQ ID NO: 7905

SEQ ID NO: 218013 - DNA, 563 bp, Canis familiaris; identical to SEQ ID NO: 7906

SEQ ID NO: 218014 - DNA, 624 bp, Canis familiaris; identical to SEQ ID NO: 7907

SEQ ID NO: 218015 - DNA, 503 bp, Canis familiaris; identical to SEQ ID NO: 7908

SEQ ID NO: 218016 - DNA, 145 bp, Canis familiaris; identical to SEQ ID NO: 7909

SEQ ID NO: 218017 - DNA, 595 bp, Canis familiaris; identical to SEQ ID NO: 7910

SEQ ID NO: 218018 - DNA, 629 bp, Canis familiaris; identical to SEQ ID NO: 7911

SEQ ID NO: 218019 - DNA, 502 bp, Canis familiaris; identical to SEQ ID NO: 7912

SEQ ID NO: 218020 - DNA, 435 bp, Canis familiaris; identical to SEQ ID NO: 7913

SEQ ID NO: 218021 - DNA, 673 bp, Canis familiaris; identical to SEQ ID NO: 7914

SEQ ID NO: 218022 - DNA, 582 bp, Canis familiaris; identical to SEQ ID NO: 7915

SEQ ID NO: 218023 - DNA, 628 bp, Canis familiaris; identical to SEQ ID NO: 7916
  misc_feature (27)..(28): n is a, c, g, or t

SEQ ID NO: 218024 - DNA, 549 bp, Canis familiaris; identical to SEQ ID NO: 7917

SEQ ID NO: 218025 - DNA, 635 bp, Canis familiaris; identical to SEQ ID NO: 7918

SEQ ID NO: 218026 - DNA, 597 bp, Canis familiaris; identical to SEQ ID NO: 7919

SEQ ID NO: 218027 - DNA, 621 bp, Canis familiaris; identical to SEQ ID NO: 7920

SEQ ID NO: 218028 - DNA, 522 bp, Canis familiaris; identical to SEQ ID NO: 7921
  misc_feature (1)..(1): n is a, c, g, or t

SEQ ID NO: 218029 - DNA, 501 bp, Canis familiaris; identical to SEQ ID NO: 7922

SEQ ID NO: 218030 - DNA, 617 bp, Canis familiaris; identical to SEQ ID NO: 7923
  misc_feature (1)..(1): n is a, c, g, or t

SEQ ID NO: 218031 - DNA, 617 bp, Canis familiaris; identical to SEQ ID NO: 7924

SEQ ID NO: 218032 - DNA, 129 bp, Canis familiaris; identical to SEQ ID NO: 7925
  misc_feature (1)..(1): n is a, c, g, or t

SEQ ID NO: 218033 - DNA, 542 bp, Canis familiaris; identical to SEQ ID NO: 7926

SEQ ID NO: 218034 - DNA, 578 bp, Canis familiaris; identical to SEQ ID NO: 7927

SEQ ID NO: 218035 - DNA, 636 bp, Canis familiaris; identical to SEQ ID NO: 7928

SEQ ID NO: 218036 - DNA, 504 bp, Canis familiaris; identical to SEQ ID NO: 7929

SEQ ID NO: 218037 - DNA, 594 bp, Canis familiaris; identical to SEQ ID NO: 7930
  misc_feature (285)..(285): n is a, c, g, or t
  misc_feature (362)..(362): n is a, c, g, or t

SEQ ID NO: 218038 - DNA, 673 bp, Canis familiaris; identical to SEQ ID NO: 7931
  misc_feature (166)..(166): n is a, c, g, or t
  misc_feature (193)..(193): n is a, c, g, or t

SEQ ID NO: 218039 - DNA, 628 bp, Canis familiaris; identical to SEQ ID NO: 7932

SEQ ID NO: 218040 - DNA, 230 bp, Canis familiaris; identical to SEQ ID NO: 7933
  misc_feature (92)..(92): n is a, c, g, or t

SEQ ID NO: 218041 - DNA, 399 bp, Canis familiaris; identical to SEQ ID NO: 7934

SEQ ID NO: 218042 - DNA, 577 bp, Canis familiaris; identical to SEQ ID NO: 7935

SEQ ID NO: 218043 - DNA, 655 bp, Canis familiaris; identical to SEQ ID NO: 7936

SEQ ID NO: 218044 - DNA, 367 bp, Canis familiaris; identical to SEQ ID NO: 7937

SEQ ID NO: 218045 - DNA, 658 bp, Canis familiaris; identical to SEQ ID NO: 7938

SEQ ID NO: 218046 - DNA, 223 bp, Canis familiaris; identical to SEQ ID NO: 7939

SEQ ID NO: 218047 - DNA, 625 bp, Canis familiaris; identical to SEQ ID NO: 7940

SEQ ID NO: 218048 - DNA, 634 bp, Canis familiaris; identical to SEQ ID NO: 7941

SEQ ID NO: 218049 - DNA, 534 bp, Canis familiaris; identical to SEQ ID NO: 7942

SEQ ID NO: 218050 - DNA, 718 bp, Canis familiaris; identical to SEQ ID NO: 7943
  misc_feature (262)..(262): n is a, c, g, or t

SEQ ID NO: 218051 - DNA, 621 bp, Canis familiaris; identical to SEQ ID NO: 7944

SEQ ID NO: 218052 - DNA, 598 bp, Canis familiaris; identical to SEQ ID NO: 7945
  misc_feature (95)..(95): n is a, c, g, or t

SEQ ID NO: 218053 - DNA, 574 bp, Canis familiaris; identical to SEQ ID NO: 7946

SEQ ID NO: 218054 - DNA, 358 bp, Canis familiaris; identical to SEQ ID NO: 7947
  misc_feature (1)..(1): n is a, c, g, or t

SEQ ID NO: 218055 - DNA, 600 bp, Canis familiaris; identical to SEQ ID NO: 7948

SEQ ID NO: 218056 - DNA, 549 bp, Canis familiaris; identical to SEQ ID NO: 7949

SEQ ID NO: 218057 - DNA, 598 bp, Canis familiaris; identical to SEQ ID NO: 7950

SEQ ID NO: 218058 - DNA, 448 bp, Canis familiaris; identical to SEQ ID NO: 7951

SEQ ID NO: 218059 - DNA, 537 bp, Canis familiaris; identical to SEQ ID NO: 7952

SEQ ID NO: 218060 - DNA, 501 bp, Canis familiaris; identical to SEQ ID NO: 7953

SEQ ID NO: 218061 - DNA, 652 bp, Canis familiaris; identical to SEQ ID NO: 7954

SEQ ID NO: 218062 - DNA, 407 bp, Canis familiaris; identical to SEQ ID NO: 7955

SEQ ID NO: 218063 - DNA, 733 bp, Canis familiaris; identical to SEQ ID NO: 7956

SEQ ID NO: 218064 - DNA, 530 bp, Canis familiaris; identical to SEQ ID NO: 7957
  misc_feature (1)..(1): n is a, c, g, or t

SEQ ID NO: 218065 - DNA, 434 bp, Canis familiaris; identical to SEQ ID NO: 7958

SEQ ID NO: 218066 - DNA, 562 bp, Canis familiaris; identical to SEQ ID NO: 7959

SEQ ID NO: 218067 - DNA, 592 bp, Canis familiaris; identical to SEQ ID NO: 7960

SEQ ID NO: 218068 - DNA, 467 bp, Canis familiaris; identical to SEQ ID NO: 7961

SEQ ID NO: 218069 - DNA, 628 bp, Canis familiaris; identical to SEQ ID NO: 7962

SEQ ID NO: 218070 - DNA, 583 bp, Canis familiaris; identical to SEQ ID NO: 7963

SEQ ID NO: 218071 - DNA, 480 bp, Canis familiaris; identical to SEQ ID NO: 7964

SEQ ID NO: 218072 - DNA, 594 bp, Canis familiaris; identical to SEQ ID NO: 7965

SEQ ID NO: 218073 - DNA, 351 bp, Canis familiaris; identical to SEQ ID NO: 7966

SEQ ID NO: 218074 - DNA, 580 bp, Canis familiaris; identical to SEQ ID NO: 7967

SEQ ID NO: 218075 - DNA, 592 bp, Canis familiaris; identical to SEQ ID NO: 7968

SEQ ID NO: 218076 - DNA, 591 bp, Canis familiaris; identical to SEQ ID NO: 7969

SEQ ID NO: 218077 - DNA, 515 bp, Canis familiaris; identical to SEQ ID NO: 7970

SEQ ID NO: 218078 - DNA, 662 bp, Canis familiaris; identical to SEQ ID NO: 7971

SEQ ID NO: 218079 - DNA, 716 bp, Canis familiaris; identical to SEQ ID NO: 7972

SEQ ID NO: 218080 - DNA, 665 bp, Canis familiaris; identical to SEQ ID NO: 7973

SEQ ID NO: 218081 - DNA, 652 bp, Canis familiaris; identical to SEQ ID NO: 7974

SEQ ID NO: 218082 - DNA, 603 bp, Canis familiaris; identical to SEQ ID NO: 7975

SEQ ID NO: 218083 - DNA, 383 bp, Canis familiaris; identical to SEQ ID NO: 7976

SEQ ID NO: 218084 - DNA, 696 bp, Canis familiaris; identical to SEQ ID NO: 7977

SEQ ID NO: 218085 - DNA, 656 bp, Canis familiaris; identical to SEQ ID NO: 7978

SEQ ID NO: 218086 - DNA, 515 bp, Canis familiaris; identical to SEQ ID NO: 7979

SEQ ID NO: 218087 - DNA, 644 bp, Canis familiaris; identical to SEQ ID NO: 7980

SEQ ID NO: 218088 - DNA, 700 bp, Canis familiaris; identical to SEQ ID NO: 7981
  misc_feature (407)..(407): n is a, c, g, or t

SEQ ID NO: 218089 - DNA, 547 bp, Canis familiaris; identical to SEQ ID NO: 7982

SEQ ID NO: 218090 - DNA, 575 bp, Canis familiaris; identical to SEQ ID NO: 7983

SEQ ID NO: 218091 - DNA, 585 bp, Canis familiaris; identical to SEQ ID NO: 7984
  misc_feature (214)..(214): n is a, c, g, or t

SEQ ID NO: 218092 - DNA, 547 bp, Canis familiaris; identical to SEQ ID NO: 7985

SEQ ID NO: 218093 - DNA, 617 bp, Canis familiaris; identical to SEQ ID NO: 7986

SEQ ID NO: 218094 - DNA, 525 bp, Canis familiaris; identical to SEQ ID NO: 7987

SEQ ID NO: 218095 - DNA, 499 bp, Canis familiaris; identical to SEQ ID NO: 7988

SEQ ID NO: 218096 - DNA, 532 bp, Canis familiaris; identical to SEQ ID NO: 7989
  misc_feature (66)..(66): n is a, c, g, or t

SEQ ID NO: 218097 - DNA, 635 bp, Canis familiaris; identical to SEQ ID NO: 7990

SEQ ID NO: 218098 - DNA, 605 bp, Canis familiaris; identical to SEQ ID NO: 7991

SEQ ID NO: 218099 - DNA, 660 bp, Canis familiaris; identical to SEQ ID NO: 7992

SEQ ID NO: 218100 - DNA, 511 bp, Canis familiaris; identical to SEQ ID NO: 7993

SEQ ID NO: 218101 - DNA, 612 bp, Canis familiaris; identical to SEQ ID NO: 7994

SEQ ID NO: 218102 - DNA, 504 bp, Canis familiaris; identical to SEQ ID NO: 7995

SEQ ID NO: 218103 - DNA, 515 bp, Canis familiaris; identical to SEQ ID NO: 7996

SEQ ID NO: 218104 - DNA, 554 bp, Canis familiaris; identical to SEQ ID NO: 7997
  misc_feature (52)..(52): n is a, c, g, or t

SEQ ID NO: 218105 - DNA, 615 bp, Canis familiaris; identical to SEQ ID NO: 7998

SEQ ID NO: 218106 - DNA, 641 bp, Canis familiaris; identical to SEQ ID NO: 7999
  misc_feature (458)..(458): n is a, c, g, or t

SEQ ID NO: 218107 - DNA, 465 bp, Canis familiaris; identical to SEQ ID NO: 8000

SEQ ID NO: 218108 - DNA, 504 bp, Canis familiaris; identical to SEQ ID NO: 8001

SEQ ID NO: 218109 - DNA, 656 bp, Canis familiaris; identical to SEQ ID NO: 8002
  misc_feature (1)..(1): n is a, c, g, or t
  misc_feature (389)..(389): n is a, c, g, or t

SEQ ID NO: 218110 - DNA, 484 bp, Canis familiaris; identical to SEQ ID NO: 8003

SEQ ID NO: 218111 - DNA, 663 bp, Canis familiaris; identical to SEQ ID NO: 8004

SEQ ID NO: 218112 - DNA, 593 bp, Canis familiaris; identical to SEQ ID NO: 8005

SEQ ID NO: 218113 - DNA, 649 bp, Canis familiaris; identical to SEQ ID NO: 8006

SEQ ID NO: 218114 - DNA, 635 bp, Canis familiaris; identical to SEQ ID NO: 8007
  misc_feature (56)..(56): n is a, c, g, or t
  misc_feature (68)..(68): n is a, c, g, or t

SEQ ID NO: 218115 - DNA, 612 bp, Canis familiaris; identical to SEQ ID NO: 8008

SEQ ID NO: 218116 - DNA, 580 bp, Canis familiaris; identical to SEQ ID NO: 8009

SEQ ID NO: 218117 - DNA, 587 bp, Canis familiaris; identical to SEQ ID NO: 8010
  misc_feature (333)..(333): n is a, c, g, or t

SEQ ID NO: 218118 - DNA, 654 bp, Canis familiaris; identical to SEQ ID NO: 8011

SEQ ID NO: 218119 - DNA, 638 bp, Canis familiaris; identical to SEQ ID NO: 8012

SEQ ID NO: 218120 - DNA, 302 bp, Canis familiaris; identical to SEQ ID NO: 8013
  misc_feature (5)..(5): n is a, c, g, or t

SEQ ID NO: 218121 - DNA, 628 bp, Canis familiaris; identical to SEQ ID NO: 8014

SEQ ID NO: 218122 - DNA, 651 bp, Canis familiaris; identical to SEQ ID NO: 8015

SEQ ID NO: 218123 - DNA, 566 bp, Canis familiaris; identical to SEQ ID NO: 8016

SEQ ID NO: 218124 - DNA, 516 bp, Canis familiaris; identical to SEQ ID NO: 8017

SEQ ID NO: 218125 - DNA, 439 bp, Canis familiaris; identical to SEQ ID NO: 8018

SEQ ID NO: 218126 - DNA, 172 bp, Canis familiaris; identical to SEQ ID NO: 8019

SEQ ID NO: 218127 - DNA, 654 bp, Canis familiaris; identical to SEQ ID NO: 8020
  misc_feature (1)..(1): n is a, c, g, or t

SEQ ID NO: 218128 - DNA, 541 bp, Canis familiaris; identical to SEQ ID NO: 8021

SEQ ID NO: 218129 - DNA, 501 bp, Canis familiaris; identical to SEQ ID NO: 8022

SEQ ID NO: 218130 - DNA, 599 bp, Canis familiaris; identical to SEQ ID NO: 8023

SEQ ID NO: 218131 - DNA, 458 bp, Canis familiaris; identical to SEQ ID NO: 8024
  misc_feature (1)..(1): n is a, c, g, or t

SEQ ID NO: 218132 - DNA, 678 bp, Canis familiaris; identical to SEQ ID NO: 8025
  misc_feature (1)..(1): n is a, c, g, or t

SEQ ID NO: 218133 - DNA, 641 bp, Canis familiaris; identical to SEQ ID NO: 8026

SEQ ID NO: 218134 - DNA, 639 bp, Canis familiaris; identical to SEQ ID NO: 8027

SEQ ID NO: 218135 - DNA, 534 bp, Canis familiaris; identical to SEQ ID NO: 8028

SEQ ID NO: 218136 - DNA, 343 bp, Canis familiaris; identical to SEQ ID NO: 8029
  misc_feature (1)..(1): n is a, c, g, or t

SEQ ID NO: 218137 - DNA, 488 bp, Canis familiaris; identical to SEQ ID NO: 8030

SEQ ID NO: 218138 - DNA, 302 bp, Canis familiaris; identical to SEQ ID NO: 8031
  misc_feature (13)..(13): n is a, c, g, or t

SEQ ID NO: 218139 - DNA, 555 bp, Canis familiaris; identical to SEQ ID NO: 8032

SEQ ID NO: 218140 - DNA, 564 bp, Canis familiaris; identical to SEQ ID NO: 8033

SEQ ID NO: 218141 - DNA, 522 bp, Canis familiaris; identical to SEQ ID NO: 8034

SEQ ID NO: 218142 - DNA, 508 bp, Canis familiaris; identical to SEQ ID NO: 8035

SEQ ID NO: 218143 - DNA, 602 bp, Canis familiaris; identical to SEQ ID NO: 8036

SEQ ID NO: 218144 - DNA, 605 bp, Canis familiaris; identical to SEQ ID NO: 8037
  misc_feature (142)..(142): n is a, c, g, or t

SEQ ID NO: 218145 - DNA, 547 bp, Canis familiaris; identical to SEQ ID NO: 8038

SEQ ID NO: 218146 - DNA, 611 bp, Canis familiaris; identical to SEQ ID NO: 8039

SEQ ID NO: 218147 - DNA, 572 bp, Canis familiaris; identical to SEQ ID NO: 8040

SEQ ID NO: 218148 - DNA, 570 bp, Canis familiaris; identical to SEQ ID NO: 8041

SEQ ID NO: 218149 - DNA, 640 bp, Canis familiaris; identical to SEQ ID NO: 8042

SEQ ID NO: 218150 - DNA, 447 bp, Canis familiaris; identical to SEQ ID NO: 8043

SEQ ID NO: 218151 - DNA, 577 bp, Canis familiaris; identical to SEQ ID NO: 8044
  misc_feature (1)..(1): n is a, c, g, or t

SEQ ID NO: 218152 - DNA, 618 bp, Canis familiaris; identical to SEQ ID NO: 8045

SEQ ID NO: 218153 - DNA, 572 bp, Canis familiaris; identical to SEQ ID NO: 8046

SEQ ID NO: 218154 - DNA, 571 bp, Canis familiaris; identical to SEQ ID NO: 8047
  misc_feature (481)..(481): n is a, c, g, or t

SEQ ID NO: 218155 - DNA, 716 bp, Canis familiaris; identical to SEQ ID NO: 8048

SEQ ID NO: 218156 - DNA, 537 bp, Canis familiaris; identical to SEQ ID NO: 8049
  misc_feature (1)..(1): n is a, c, g, or t

SEQ ID NO: 218157 - DNA, 569 bp, Canis familiaris; identical to SEQ ID NO: 8050

SEQ ID NO: 218158 - DNA, 601 bp, Canis familiaris; identical to SEQ ID NO: 8051
  misc_feature (291)..(291): n is a, c, g, or t

SEQ ID NO: 218159 - DNA, 625 bp, Canis familiaris; identical to SEQ ID NO: 8052

SEQ ID NO: 218160 - DNA, 611 bp, Canis familiaris; identical to SEQ ID NO: 8053

SEQ ID NO: 218161 - DNA, 617 bp, Canis familiaris; identical to SEQ ID NO: 8054

SEQ ID NO: 218162 - DNA, 525 bp, Canis familiaris; identical to SEQ ID NO: 8055
  misc_feature (1)..(1): n is a, c, g, or t

SEQ ID NO: 218163 - DNA, 640 bp, Canis familiaris; identical to SEQ ID NO: 8056

SEQ ID NO: 218164 - DNA, 492 bp, Canis familiaris; identical to SEQ ID NO: 8057

SEQ ID NO: 218165 - DNA, 648 bp, Canis familiaris; identical to SEQ ID NO: 8058
  misc_feature (1)..(1): n is a, c, g, or t

SEQ ID NO: 218166 - DNA, 638 bp, Canis familiaris; identical to SEQ ID NO: 8059
  misc_feature (345)..(345): n is a, c, g, or t

SEQ ID NO: 218167 - DNA, 697 bp, Canis familiaris; identical to SEQ ID NO: 8060
  misc_feature (1)..(1): n is a, c, g, or t

SEQ ID NO: 218168 - DNA, 495 bp, Canis familiaris; identical to SEQ ID NO: 8061

SEQ ID NO: 218169 - DNA, 609 bp, Canis familiaris; identical to SEQ ID NO: 8062

SEQ ID NO: 218170 - DNA, 601 bp, Canis familiaris; identical to SEQ ID NO: 8063
  misc_feature (200)..(200): n is a, c, g, or t
  misc_feature (204)..(204): n is a, c, g, or t
  misc_feature (300)..(300): n is a, c, g, or t

SEQ ID NO: 218171 - DNA, 354 bp, Canis familiaris; identical to SEQ ID NO: 8064

SEQ ID NO: 218172 - DNA, 608 bp, Canis familiaris; identical to SEQ ID NO: 8065
  misc_feature (17)..(17): n is a, c, g, or t

SEQ ID NO: 218173 - DNA, 628 bp, Canis familiaris; identical to SEQ ID NO: 8066

SEQ ID NO: 218174 - DNA, 580 bp, Canis familiaris; identical to SEQ ID NO: 8067

SEQ ID NO: 218175 - DNA, 623 bp, Canis familiaris; identical to SEQ ID NO: 8068

SEQ ID NO: 218176 - DNA, 642 bp, Canis familiaris; identical to SEQ ID NO: 8069

SEQ ID NO: 218177 - DNA, 623 bp, Canis familiaris; identical to SEQ ID NO: 8070

SEQ ID NO: 218178 - DNA, 500 bp, Canis familiaris; identical to SEQ ID NO: 8071

SEQ ID NO: 218179 - DNA, 565 bp, Canis familiaris; identical to SEQ ID NO: 8072

SEQ ID NO: 218180 - DNA, 640 bp, Canis familiaris; identical to SEQ ID NO: 8073

SEQ ID NO: 218181 - DNA, 583 bp, Canis familiaris; identical to SEQ ID NO: 8074

SEQ ID NO: 218182 - DNA, 597 bp, Canis familiaris; identical to SEQ ID NO: 8075
  misc_feature (380)..(380): n is a, c, g, or t

SEQ ID NO: 218183 - DNA, 546 bp, Canis familiaris; identical to SEQ ID NO: 8076

SEQ ID NO: 218184 - DNA, 599 bp, Canis familiaris; identical to SEQ ID NO: 8077

SEQ ID NO: 218185 - DNA, 628 bp, Canis familiaris; identical to SEQ ID NO: 8078

SEQ ID NO: 218186 - DNA, 425 bp, Canis familiaris; identical to SEQ ID NO: 8079

SEQ ID NO: 218187 - DNA, 597 bp, Canis familiaris; identical to SEQ ID NO: 8080

SEQ ID NO: 218188 - DNA, 604 bp, Canis familiaris; identical to SEQ ID NO: 8081

SEQ ID NO: 218189 - DNA, 558 bp, Canis familiaris; identical to SEQ ID NO: 8082

SEQ ID NO: 218190 - DNA, 622 bp, Canis familiaris; identical to SEQ ID NO: 8083

SEQ ID NO: 218191 - DNA, 393 bp, Canis familiaris; identical to SEQ ID NO: 8084
  misc_feature (1)..(1): n is a, c, g, or t

SEQ ID NO: 218192 - DNA, 604 bp, Canis familiaris; identical to SEQ ID NO: 8085

SEQ ID NO: 218193 - DNA, 658 bp, Canis familiaris; identical to SEQ ID NO: 8086
  misc_feature (458)..(458): n is a, c, g, or t
  misc_feature (541)..(541): n is a, c, g, or t

SEQ ID NO: 218194 - DNA, 692 bp, Canis familiaris; identical to SEQ ID NO: 8087
  misc_feature (94)..(94): n is a, c, g, or t

SEQ ID NO: 218195 - DNA, 599 bp, Canis familiaris; identical to SEQ ID NO: 8088

SEQ ID NO: 218196 - DNA, 625 bp, Canis familiaris; identical to SEQ ID NO: 8089

SEQ ID NO: 218197 - DNA, 645 bp, Canis familiaris; identical to SEQ ID NO: 8090

SEQ ID NO: 218198 - DNA, 603 bp, Canis familiaris; identical to SEQ ID NO: 8091

SEQ ID NO: 218199 - DNA, 603 bp, Canis familiaris; identical to SEQ ID NO: 8092

SEQ ID NO: 218200 - DNA, 602 bp, Canis familiaris; identical to SEQ ID NO: 8093

SEQ ID NO: 218201 - DNA, 588 bp, Canis familiaris; identical to SEQ ID NO: 8094

SEQ ID NO: 218202 - DNA, 639 bp, Canis familiaris; identical to SEQ ID NO: 8095
  misc_feature (169)..(169): n is a, c, g, or t

SEQ ID NO: 218203 - DNA, 703 bp, Canis familiaris; identical to SEQ ID NO: 8096

SEQ ID NO: 218204 - DNA, 619 bp, Canis familiaris; identical to SEQ ID NO: 8097

SEQ ID NO: 218205 - DNA, 593 bp, Canis familiaris; identical to SEQ ID NO: 8098

SEQ ID NO: 218206 - DNA, 620 bp, Canis familiaris; identical to SEQ ID NO: 8099

SEQ ID NO: 218207 - DNA, 569 bp, Canis familiaris; identical to SEQ ID NO: 8100

SEQ ID NO: 218208 - DNA, 638 bp, Canis familiaris; identical to SEQ ID NO: 8101

SEQ ID NO: 218209 - DNA, 642 bp, Canis familiaris; identical to SEQ ID NO: 8102

SEQ ID NO: 218210 - DNA, 684 bp, Canis familiaris; identical to SEQ ID NO: 8103

SEQ ID NO: 218211 - DNA, 579 bp, Canis familiaris; identical to SEQ ID NO: 8104

SEQ ID NO: 218212 - DNA, 641 bp, Canis familiaris; identical to SEQ ID NO: 8105

SEQ ID NO: 218213 - DNA, 611 bp, Canis familiaris; identical to SEQ ID NO: 8106

SEQ ID NO: 218214 - DNA, 546 bp, Canis familiaris; identical to SEQ ID NO: 8107
  misc_feature (1)..(1): n is a, c, g, or t

SEQ ID NO: 218215 - DNA, 660 bp, Canis familiaris; identical to SEQ ID NO: 8108
  misc_feature (56)..(56): n is a, c, g, or t

SEQ ID NO: 218216 - DNA, 455 bp, Canis familiaris; identical to SEQ ID NO: 8109

SEQ ID NO: 218217 - DNA, 579 bp, Canis familiaris; identical to SEQ ID NO: 8110

SEQ ID NO: 218218 - DNA, 656 bp, Canis familiaris; identical to SEQ ID NO: 8111
  misc_feature (474)..(474): n is a, c, g, or t
  misc_feature (485)..(485): n is a, c, g, or t
  misc_feature (493)..(494): n is a, c, g, or t

SEQ ID NO: 218219 - DNA, 644 bp, Canis familiaris; identical to SEQ ID NO: 8112
  misc_feature (1)..(1): n is a, c, g, or t

SEQ ID NO: 218220 - DNA, 679 bp, Canis familiaris; identical to SEQ ID NO: 8113

SEQ ID NO: 218221 - DNA, 532 bp, Canis familiaris; identical to SEQ ID NO: 8114
  misc_feature (1)..(1): n is a, c, g, or t

SEQ ID NO: 218222 - DNA, 721 bp, Canis familiaris; identical to SEQ ID NO: 8115
  misc_feature (1)..(1): n is a, c, g, or t
  misc_feature (513)..(514): n is a, c, g, or t
  misc_feature (519)..(520): n is a, c, g, or t
  misc_feature (535)..(536): n is a, c, g, or t
  misc_feature (544)..(545): n is a, c, g, or t
  misc_feature (555)..(555): n is a, c, g, or t
  misc_feature (572)..(573): n is a, c, g, or t
  misc_feature (575)..(575): n is a, c, g, or t

SEQ ID NO: 218223 - DNA, 593 bp, Canis familiaris; identical to SEQ ID NO: 8116

SEQ ID NO: 218224 - DNA, 629 bp, Canis familiaris; identical to SEQ ID NO: 8117

SEQ ID NO: 218225 - DNA, 687 bp, Canis familiaris; identical to SEQ ID NO: 8118
  misc_feature (517)..(517): n is a, c, g, or t
  misc_feature (525)..(525): n is a, c, g, or t

SEQ ID NO: 218226 - DNA, 664 bp, Canis familiaris; identical to SEQ ID NO: 8119
  misc_feature (352)..(352): n is a, c, g, or t

SEQ ID NO: 218227 - DNA, 647 bp, Canis familiaris; identical to SEQ ID NO: 8120

SEQ ID NO: 218228 - DNA, 546 bp, Canis familiaris; identical to SEQ ID NO: 8121
  misc_feature (279)..(279): n is a, c, g, or t

SEQ ID NO: 218229 - DNA, 680 bp, Canis familiaris; identical to SEQ ID NO: 8122

SEQ ID NO: 218230 - DNA, 650 bp, Canis familiaris; identical to SEQ ID NO: 8123

SEQ ID NO: 218231 - DNA, 514 bp, Canis familiaris; identical to SEQ ID NO: 8124
  misc_feature (1)..(1): n is a, c, g, or t

SEQ ID NO: 218232 - DNA, 407 bp, Canis familiaris; identical to SEQ ID NO: 8125

SEQ ID NO: 218233 - DNA, 594 bp, Canis familiaris; identical to SEQ ID NO: 8126

SEQ ID NO: 218234 - DNA, 733 bp, Canis familiaris; identical to SEQ ID NO: 8127
  misc_feature (256)..(256): n is a, c, g, or t
  misc_feature (325)..(325): n is a, c, g, or t
  misc_feature (411)..(411): n is a, c, g, or t

SEQ ID NO: 218235 - DNA, 600 bp, Canis familiaris; identical to SEQ ID NO: 8128

SEQ ID NO: 218236 - DNA, 619 bp, Canis familiaris; identical to SEQ ID NO: 8129

SEQ ID NO: 218237 - DNA, 529 bp, Canis familiaris; identical to SEQ ID NO: 8130

SEQ ID NO: 218238 - DNA, 656 bp, Canis familiaris; identical to SEQ ID NO: 8131

SEQ ID NO: 218239 - DNA, 676 bp, Canis familiaris; identical to SEQ ID NO: 8132

SEQ ID NO: 218240 - DNA, 660 bp, Canis familiaris; identical to SEQ ID NO: 8133

SEQ ID NO: 218241 - DNA, 320 bp, Canis familiaris; identical to SEQ ID NO: 8134
  misc_feature (1)..(1): n is a, c, g, or t

SEQ ID NO: 218242 - DNA, 581 bp, Canis familiaris; identical to SEQ ID NO: 8135

SEQ ID NO: 218243 - DNA, 566 bp, Canis familiaris; identical to SEQ ID NO: 8136

SEQ ID NO: 218244 - DNA, 623 bp, Canis familiaris; identical to SEQ ID NO: 8137

SEQ ID NO: 218245 - DNA, 542 bp, Canis familiaris; identical to SEQ ID NO: 8138

SEQ ID NO: 218246 - DNA, 653 bp, Canis familiaris; identical to SEQ ID NO: 8139

SEQ ID NO: 218247 - DNA, 596 bp, Canis familiaris; identical to SEQ ID NO: 8140

SEQ ID NO: 218248 - DNA, 605 bp, Canis familiaris; identical to SEQ ID NO: 8141

SEQ ID NO: 218249 - DNA, 601 bp, Canis familiaris; identical to SEQ ID NO: 8142

SEQ ID NO: 218250 - DNA, 672 bp, Canis familiaris; identical to SEQ ID NO: 8143

SEQ ID NO: 218251 - DNA, 582 bp, Canis familiaris; identical to SEQ ID NO: 8144

SEQ ID NO: 218252 - DNA, 475 bp, Canis familiaris; identical to SEQ ID NO: 8145

SEQ ID NO: 218253 - DNA, 658 bp, Canis familiaris; identical to SEQ ID NO: 8146

SEQ ID NO: 218254 - DNA, 194 bp, Canis familiaris; identical to SEQ ID NO: 8147

SEQ ID NO: 218255 - DNA, 196 bp, Canis familiaris; identical to SEQ ID NO: 8148

SEQ ID NO: 218256 - DNA, 621 bp, Canis familiaris; identical to SEQ ID NO: 8149

SEQ ID NO: 218257 - DNA, 547 bp, Canis familiaris; identical to SEQ ID NO: 8150

SEQ ID NO: 218258 - DNA, 561 bp, Canis familiaris; identical to SEQ ID NO: 8151

SEQ ID NO: 218259 - DNA, 632 bp, Canis familiaris; identical to SEQ ID NO: 8152

SEQ ID NO: 218260 - DNA, 103 bp, Canis familiaris; identical to SEQ ID NO: 8153

SEQ ID NO: 218261 - DNA, 600 bp, Canis familiaris; identical to SEQ ID NO: 8154
  misc_feature (203)..(203): n is a, c, g, or t
  misc_feature (222)..(222): n is a, c, g, or t
  misc_feature (243)..(243): n is a, c, g, or t
  misc_feature (266)..(267): n is a, c, g, or t
  misc_feature (335)..(336): n is a, c, g, or t
  misc_feature (346)..(346): n is a, c, g, or t
  misc_feature (352)..(352): n is a, c, g, or t
  misc_feature (373)..(373): n is a, c, g, or t
  misc_feature (397)..(397): n is a, c, g, or t

SEQ ID NO: 218262 - DNA, 657 bp, Canis familiaris; identical to SEQ ID NO: 8155
  misc_feature (239)..(239): n is a, c, g, or t

SEQ ID NO: 218263 - DNA, 532 bp, Canis familiaris; identical to SEQ ID NO: 8156

SEQ ID NO: 218264 - DNA, 599 bp, Canis familiaris; identical to SEQ ID NO: 8157

SEQ ID NO: 218265 - DNA, 625 bp, Canis familiaris; identical to SEQ ID NO: 8158

SEQ ID NO: 218266 - DNA, 567 bp, Canis familiaris; identical to SEQ ID NO: 8159

SEQ ID NO: 218267 - DNA, 633 bp, Canis familiaris; identical to SEQ ID NO: 8160

SEQ ID NO: 218268 - DNA, 547 bp, Canis familiaris; identical to SEQ ID NO: 8161

SEQ ID NO: 218269 - DNA, 634 bp, Canis familiaris; identical to SEQ ID NO: 8162

SEQ ID NO: 218270 - DNA, 600 bp, Canis familiaris; identical to SEQ ID NO: 8163

SEQ ID NO: 218271 - DNA, 619 bp, Canis familiaris; identical to SEQ ID NO: 8164

SEQ ID NO: 218272 - DNA, 462 bp, Canis familiaris; identical to SEQ ID NO: 8165

SEQ ID NO: 218273 - DNA, 520 bp, Canis familiaris; identical to SEQ ID NO: 8166
  misc_feature (241)..(242): n is a, c, g, or t

SEQ ID NO: 218274 - DNA, 584 bp, Canis familiaris; identical to SEQ ID NO: 8167
  misc_feature (1)..(1): n is a, c, g, or t

SEQ ID NO: 218275 - DNA, 667 bp, Canis familiaris; identical to SEQ ID NO: 8168

SEQ ID NO: 218276 - DNA, 611 bp, Canis familiaris; identical to SEQ ID NO: 8169

SEQ ID NO: 218277 - DNA, 607 bp, Canis familiaris; identical to SEQ ID NO: 8170

SEQ ID NO: 218278 - DNA, 658 bp, Canis familiaris; identical to SEQ ID NO: 8171

SEQ ID NO: 218279 - DNA, 681 bp, Canis familiaris; identical to SEQ ID NO: 8172

SEQ ID NO: 218280 - DNA, 565 bp, Canis familiaris; identical to SEQ ID NO: 8173

SEQ ID NO: 218281 - DNA, 682 bp, Canis familiaris; identical to SEQ ID NO: 8174

SEQ ID NO: 218282 - DNA, 571 bp, Canis familiaris; identical to SEQ ID NO: 8175

SEQ ID NO: 218283 - DNA, 685 bp, Canis familiaris; identical to SEQ ID NO: 8176

SEQ ID NO: 218284 - DNA, 583 bp, Canis familiaris; identical to SEQ ID NO: 8177

SEQ ID NO: 218285 - DNA, 600 bp, Canis familiaris; identical to SEQ ID NO: 8178
  misc_feature (1)..(1): n is a, c, g, or t

SEQ ID NO: 218286 - DNA, 692 bp, Canis familiaris; identical to SEQ ID NO: 8179

SEQ ID NO: 218287 - DNA, 604 bp, Canis familiaris; identical to SEQ ID NO: 8180
  misc_feature (1)..(1): n is a, c, g, or t

SEQ ID NO: 218288 - DNA, 580 bp, Canis familiaris; identical to SEQ ID NO: 8181

SEQ ID NO: 218289 - DNA, 524 bp, Canis familiaris; identical to SEQ ID NO: 8182

SEQ ID NO: 218290 - DNA, 641 bp, Canis familiaris; identical to SEQ ID NO: 8183

SEQ ID NO: 218291 - DNA, 558 bp, Canis familiaris; identical to SEQ ID NO: 8184
  misc_feature (1)..(1): n is a, c, g, or t

SEQ ID NO: 218292 - DNA, 614 bp, Canis familiaris; identical to SEQ ID NO: 8185

SEQ ID NO: 218293 - DNA, 631 bp, Canis familiaris; identical to SEQ ID NO: 8186
  misc_feature (1)..(1): n is a, c, g, or t

SEQ ID NO: 218294 - DNA, 660 bp, Canis familiaris; identical to SEQ ID NO: 8187

SEQ ID NO: 218295 - DNA, 558 bp, Canis familiaris; identical to SEQ ID NO: 8188

SEQ ID NO: 218296 - DNA, 649 bp, Canis familiaris; identical to SEQ ID NO: 8189

SEQ ID NO: 218297 - DNA, 623 bp, Canis familiaris; identical to SEQ ID NO: 8190

SEQ ID NO: 218298 - DNA, 595 bp, Canis familiaris; identical to SEQ ID NO: 8191

SEQ ID NO: 218299 - DNA, 527 bp, Canis familiaris; identical to SEQ ID NO: 8192
  misc_feature (1)..(1): n is a, c, g, or t
  misc_feature (66)..(66): n is a, c, g, or t
  misc_feature (75)..(75): n is a, c, g, or t

SEQ ID NO: 218300 - DNA, 637 bp, Canis familiaris; identical to SEQ ID NO: 8193

SEQ ID NO: 218301 - DNA, 618 bp, Canis familiaris; identical to SEQ ID NO: 8194

SEQ ID NO: 218302 - DNA, 645 bp, Canis familiaris; identical to SEQ ID NO: 8195

SEQ ID NO: 218303 - DNA, 617 bp, Canis familiaris; identical to SEQ ID NO: 8196
  misc_feature (55)..(55): n is a, c, g, or t

SEQ ID NO: 218304 - DNA, 651 bp, Canis familiaris; identical to SEQ ID NO: 8197

SEQ ID NO: 218305 - DNA, 589 bp, Canis familiaris; identical to SEQ ID NO: 8198

SEQ ID NO: 218306 - DNA, 628 bp, Canis familiaris; identical to SEQ ID NO: 8199

SEQ ID NO: 218307 - DNA, 662 bp, Canis familiaris; identical to SEQ ID NO: 8200

SEQ ID NO: 218308 - DNA, 579 bp, Canis familiaris; identical to SEQ ID NO: 8201

SEQ ID NO: 218309 - DNA, 587 bp, Canis familiaris; identical to SEQ ID NO: 8202

SEQ ID NO: 218310 - DNA, 606 bp, Canis familiaris; identical to SEQ ID NO: 8203

SEQ ID NO: 218311 - DNA, 667 bp, Canis familiaris; identical to SEQ ID NO: 8204
  misc_feature (50)..(50): n is a, c, g, or t

SEQ ID NO: 218312 - DNA, 631 bp, Canis familiaris; identical to SEQ ID NO: 8205

SEQ ID NO: 218313 - DNA, 409 bp, Canis familiaris; identical to SEQ ID NO: 8206

SEQ ID NO: 218314 - DNA, 649 bp, Canis familiaris; identical to SEQ ID NO: 8207
  misc_feature (1)..(1): n is a, c, g, or t

SEQ ID NO: 218315 - DNA, 642 bp, Canis familiaris; identical to SEQ ID NO: 8208

SEQ ID NO: 218316 - DNA, 624 bp, Canis familiaris; identical to SEQ ID NO: 8209

SEQ ID NO: 218317 - DNA, 608 bp, Canis familiaris; identical to SEQ ID NO: 8210
  misc_feature (201)..(201): n is a, c, g, or t

SEQ ID NO: 218318 - DNA, 382 bp, Canis familiaris; identical to SEQ ID NO: 8211
  misc_feature (1)..(1): n is a, c, g, or t

SEQ ID NO: 218319 - DNA, 547 bp, Canis familiaris; identical to SEQ ID NO: 8212

SEQ ID NO: 218320 - DNA, 658 bp, Canis familiaris; identical to SEQ ID NO: 8213
  misc_feature (1)..(1): n is a, c, g, or t

SEQ ID NO: 218321 - DNA, 524 bp, Canis familiaris; identical to SEQ ID NO: 8214

SEQ ID NO: 218322 - DNA, 565 bp, Canis familiaris; identical to SEQ ID NO: 8215

SEQ ID NO: 218323 - DNA, 619 bp, Canis familiaris; identical to SEQ ID NO: 8216

SEQ ID NO: 218324 - DNA, 620 bp, Canis familiaris; identical to SEQ ID NO: 8217

SEQ ID NO: 218325 - DNA, 651 bp, Canis familiaris; identical to SEQ ID NO: 8218

SEQ ID NO: 218326 - DNA, 579 bp, Canis familiaris; identical to SEQ ID NO: 8219

SEQ ID NO: 218327 - DNA, 696 bp, Canis familiaris; identical to SEQ ID NO: 8220

SEQ ID NO: 218328 - DNA, 635 bp, Canis familiaris; identical to SEQ ID NO: 8221

SEQ ID NO: 218329 - DNA, 277 bp, Canis familiaris; identical to SEQ ID NO: 8222
  misc_feature (1)..(1): n is a, c, g, or t

SEQ ID NO: 218330 - DNA, 688 bp, Canis familiaris; identical to SEQ ID NO: 8223

SEQ ID NO: 218331 - DNA, 643 bp, Canis familiaris; identical to SEQ ID NO: 8224

SEQ ID NO: 218332 - DNA, 495 bp, Canis familiaris; identical to SEQ ID NO: 8225

SEQ ID NO: 218333 - DNA, 678 bp, Canis familiaris; identical to SEQ ID NO: 8226

SEQ ID NO: 218334 - DNA, 598 bp, Canis familiaris; identical to SEQ ID NO: 8227

SEQ ID NO: 218335 - DNA, 568 bp, Canis familiaris; identical to SEQ ID NO: 8228

SEQ ID NO: 218336 - DNA, 591 bp, Canis familiaris; identical to SEQ ID NO: 8229

SEQ ID NO: 218337 - DNA, 584 bp, Canis familiaris; identical to SEQ ID NO: 8230

SEQ ID NO: 218338 - DNA, 435 bp, Canis familiaris; identical to SEQ ID NO: 8231

SEQ ID NO: 218339 - DNA, 583 bp, Canis familiaris; identical to SEQ ID NO: 8232

SEQ ID NO: 218340 - DNA, 647 bp, Canis familiaris; identical to SEQ ID NO: 8233

SEQ ID NO: 218341 - DNA, 581 bp, Canis familiaris; identical to SEQ ID NO: 8234

SEQ ID NO: 218342 - DNA, 550 bp, Canis familiaris; identical to SEQ ID NO: 8235

SEQ ID NO: 218343 - DNA, 571 bp, Canis familiaris; identical to SEQ ID NO: 8236

SEQ ID NO: 218344 - DNA, 600 bp, Canis familiaris; identical to SEQ ID NO: 8237

SEQ ID NO: 218345 - DNA, 600 bp, Canis familiaris; identical to SEQ ID NO: 8238

SEQ ID NO: 218346 - DNA, 614 bp, Canis familiaris; identical to SEQ ID NO: 8239

SEQ ID NO: 218347 - DNA, 594 bp, Canis familiaris; identical to SEQ ID NO: 8240

SEQ ID NO: 218348 - DNA, 571 bp, Canis familiaris; identical to SEQ ID NO: 8241

SEQ ID NO: 218349 - DNA, 633 bp, Canis familiaris; identical to SEQ ID NO: 8242

SEQ ID NO: 218350 - DNA, 592 bp, Canis familiaris; identical to SEQ ID NO: 8243

SEQ ID NO: 218351 - DNA, 573 bp, Canis familiaris; identical to SEQ ID NO: 8244

SEQ ID NO: 218352 - DNA, 413 bp, Canis familiaris; identical to SEQ ID NO: 8245

SEQ ID NO: 218353 - DNA, 628 bp, Canis familiaris; identical to SEQ ID NO: 8246

SEQ ID NO: 218354 - DNA, 582 bp, Canis familiaris; identical to SEQ ID NO: 8247

SEQ ID NO: 218355 - DNA, 409 bp, Canis familiaris; identical to SEQ ID NO: 8248

SEQ ID NO: 218356 - DNA, 614 bp, Canis familiaris; identical to SEQ ID NO: 8249
  misc_feature (17)..(17): n is a, c, g, or t

SEQ ID NO: 218357 - DNA, 666 bp, Canis familiaris; identical to SEQ ID NO: 8250

SEQ ID NO: 218358 - DNA, 559 bp, Canis familiaris; identical to SEQ ID NO: 8251

SEQ ID NO: 218359 - DNA, 590 bp, Canis familiaris; identical to SEQ ID NO: 8252

SEQ ID NO: 218360 - DNA, 341 bp, Canis familiaris; identical to SEQ ID NO: 8253

SEQ ID NO: 218361 - DNA, 556 bp, Canis familiaris; identical to SEQ ID NO: 8254

SEQ ID NO: 218362 - DNA, 575 bp, Canis familiaris; identical to SEQ ID NO: 8255
  misc_feature (1)..(1): n is a, c, g, or t

SEQ ID NO: 218363 - DNA, 537 bp, Canis familiaris; identical to SEQ ID NO: 8256
  misc_feature (1)..(1): n is a, c, g, or t

SEQ ID NO: 218364 - DNA, 516 bp, Canis familiaris; identical to SEQ ID NO: 8257
  misc_feature (271)..(271): n is a, c, g, or t

SEQ ID NO: 218365 - DNA, 440 bp, Canis familiaris; identical to SEQ ID NO: 8258

SEQ ID NO: 218366 - DNA, 446 bp, Canis familiaris; identical to SEQ ID NO: 8259

SEQ ID NO: 218367 - DNA, 588 bp, Canis familiaris; identical to SEQ ID NO: 8260

SEQ ID NO: 218368 - DNA, 628 bp, Canis familiaris; identical to SEQ ID NO: 8261

SEQ ID NO: 218369 - DNA, 648 bp, Canis familiaris; identical to SEQ ID NO: 8262

SEQ ID NO: 218370 - DNA, 590 bp, Canis familiaris; identical to SEQ ID NO: 8263

SEQ ID NO: 218371 - DNA, 569 bp, Canis familiaris; identical to SEQ ID NO: 8264
  misc_feature (1)..(1): n is a, c, g, or t

SEQ ID NO: 218372 - DNA, 627 bp, Canis familiaris; identical to SEQ ID NO: 8265

SEQ ID NO: 218373 - DNA, 654 bp, Canis familiaris; identical to SEQ ID NO: 8266

SEQ ID NO: 218374 - DNA, 572 bp, Canis familiaris; identical to SEQ ID NO: 8267

SEQ ID NO: 218375 - DNA, 563 bp, Canis familiaris; identical to SEQ ID NO: 8268

SEQ ID NO: 218376 - DNA, 589 bp, Canis familiaris; identical to SEQ ID NO: 8269

SEQ ID NO: 218377 - DNA, 588 bp, Canis familiaris; identical to SEQ ID NO: 8270

SEQ ID NO: 218378 - DNA, 626 bp, Canis familiaris; identical to SEQ ID NO: 8271

SEQ ID NO: 218379 - DNA, 564 bp, Canis familiaris; identical to SEQ ID NO: 8272

SEQ ID NO: 218380 - DNA, 585 bp, Canis familiaris; identical to SEQ ID NO: 8273

SEQ ID NO: 218381 - DNA, 546 bp, Canis familiaris; identical to SEQ ID NO: 8274

SEQ ID NO: 218382 - DNA, 570 bp, Canis familiaris; identical to SEQ ID NO: 8275
  misc_feature (281)..(281): n is a, c, g, or t

SEQ ID NO: 218383 - DNA, 566 bp, Canis familiaris; identical to SEQ ID NO: 8276

SEQ ID NO: 218384 - DNA, 476 bp, Canis familiaris; identical to SEQ ID NO: 8277

SEQ ID NO: 218385 - DNA, 374 bp, Canis familiaris; identical to SEQ ID NO: 8278

SEQ ID NO: 218386 - DNA, 574 bp, Canis familiaris; identical to SEQ ID NO: 8279

SEQ ID NO: 218387 - DNA, 532 bp, Canis familiaris; identical to SEQ ID NO: 8280

SEQ ID NO: 218388 - DNA, 645 bp, Canis familiaris; identical to SEQ ID NO: 8281

SEQ ID NO: 218389 - DNA, 596 bp, Canis familiaris; identical to SEQ ID NO: 8282

SEQ ID NO: 218390 - DNA, 522 bp, Canis familiaris; identical to SEQ ID NO: 8283

SEQ ID NO: 218391 - DNA, 630 bp, Canis familiaris; identical to SEQ ID NO: 8284
  misc_feature (262)..(262): n is a, c, g, or t

SEQ ID NO: 218392 - DNA, 664 bp, Canis familiaris; identical to SEQ ID NO: 8285

SEQ ID NO: 218393 - DNA, 557 bp, Canis familiaris; identical to SEQ ID NO: 8286
  misc_feature (1)..(1): n is a, c, g, or t

SEQ ID NO: 218394 - DNA, 604 bp, Canis familiaris; identical to SEQ ID NO: 8287

SEQ ID NO: 218395 - DNA, 623 bp, Canis familiaris; identical to SEQ ID NO: 8288

SEQ ID NO: 218396 - DNA, 631 bp, Canis familiaris; identical to SEQ ID NO: 8289

SEQ ID NO: 218397 - DNA, 355 bp, Canis familiaris; identical to SEQ ID NO: 8290

SEQ ID NO: 218398 - DNA, 585 bp, Canis familiaris; identical to SEQ ID NO: 8291

SEQ ID NO: 218399 - DNA, 667 bp, Canis familiaris; identical to SEQ ID NO: 8292

SEQ ID NO: 218400 - DNA, 565 bp, Canis familiaris; identical to SEQ ID NO: 8293

SEQ ID NO: 218401 - DNA, 661 bp, Canis familiaris; identical to SEQ ID NO: 8294

SEQ ID NO: 218402 - DNA, 570 bp, Canis familiaris; identical to SEQ ID NO: 8295

SEQ ID NO: 218403 - DNA, 625 bp, Canis familiaris; identical to SEQ ID NO: 8296

SEQ ID NO: 218404 - DNA, 543 bp, Canis familiaris; identical to SEQ ID NO: 8297
  misc_feature (80)..(80): n is a, c, g, or t

SEQ ID NO: 218405 - DNA, 633 bp, Canis familiaris; identical to SEQ ID NO: 8298

SEQ ID NO: 218406 - DNA, 589 bp, Canis familiaris; identical to SEQ ID NO: 8299

SEQ ID NO: 218407 - DNA, 146 bp, Canis familiaris; identical to SEQ ID NO: 8300

SEQ ID NO: 218408 - DNA, 621 bp, Canis familiaris; identical to SEQ ID NO: 8301

SEQ ID NO: 218409 - DNA, 630 bp, Canis familiaris; identical to SEQ ID NO: 8302

SEQ ID NO: 218410 - DNA, 626 bp, Canis familiaris; identical to SEQ ID NO: 8303

SEQ ID NO: 218411 - DNA, 589 bp, Canis familiaris; identical to SEQ ID NO: 8304

SEQ ID NO: 218412 - DNA, 678 bp, Canis familiaris; identical to SEQ ID NO: 8305
  misc_feature (149)..(149): n is a, c, g, or t

SEQ ID NO: 218413 - DNA, 710 bp, Canis familiaris; identical to SEQ ID NO: 8306

SEQ ID NO: 218414 - DNA, 638 bp, Canis familiaris; identical to SEQ ID NO: 8307

SEQ ID NO: 218415 - DNA, 607 bp, Canis familiaris; identical to SEQ ID NO: 8308

SEQ ID NO: 218416 - DNA, 635 bp, Canis familiaris; identical to SEQ ID NO: 8309

SEQ ID NO: 218417 - DNA, 584 bp, Canis familiaris; identical to SEQ ID NO: 8310
  misc_feature (309)..(309): n is a, c, g, or t

SEQ ID NO: 218418 - DNA, 567 bp, Canis familiaris; identical to SEQ ID NO: 8311

SEQ ID NO: 218419 - DNA, 610 bp, Canis familiaris; identical to SEQ ID NO: 8312

SEQ ID NO: 218420 - DNA, 566 bp, Canis familiaris; identical to SEQ ID NO: 8313
  misc_feature (326)..(326): n is a, c, g, or t

SEQ ID NO: 218421 - DNA, 546 bp, Canis familiaris; identical to SEQ ID NO: 8314

SEQ ID NO: 218422 - DNA, 660 bp, Canis familiaris; identical to SEQ ID NO: 8315

SEQ ID NO: 218423 - DNA, 610 bp, Canis familiaris; identical to SEQ ID NO: 8316

SEQ ID NO: 218424 - DNA, 569 bp, Canis familiaris; identical to SEQ ID NO: 8317

SEQ ID NO: 218425 - DNA, 665 bp, Canis familiaris; identical to SEQ ID NO: 8318

SEQ ID NO: 218426 - DNA, 611 bp, Canis familiaris; identical to SEQ ID NO: 8319

SEQ ID NO: 218427 - DNA, 440 bp, Canis familiaris; identical to SEQ ID NO: 8320

SEQ ID NO: 218428 - DNA, 391 bp, Canis familiaris; identical to SEQ ID NO: 8321

SEQ ID NO: 218429 - DNA, 597 bp, Canis familiaris; identical to SEQ ID NO: 8322

SEQ ID NO: 218430 - DNA, 602 bp, Canis familiaris; identical to SEQ ID NO: 8323

SEQ ID NO: 218431 - DNA, 570 bp, Canis familiaris; identical to SEQ ID NO: 8324

SEQ ID NO: 218432 - DNA, 644 bp, Canis familiaris; identical to SEQ ID NO: 8325

SEQ ID NO: 218433 - DNA, 609 bp, Canis familiaris; identical to SEQ ID NO: 8326

SEQ ID NO: 218434 - DNA, 453 bp, Canis familiaris; identical to SEQ ID NO: 8327

SEQ ID NO: 218435 - DNA, 606 bp, Canis familiaris; identical to SEQ ID NO: 8328

SEQ ID NO: 218436 - DNA, 647 bp, Canis familiaris; identical to SEQ ID NO: 8329

SEQ ID NO: 218437 - DNA, 559 bp, Canis familiaris; identical to SEQ ID NO: 8330

SEQ ID NO: 218438 - DNA, 574 bp, Canis familiaris; identical to SEQ ID NO: 8331
  misc_feature (326)..(326): n is a, c, g, or t

SEQ ID NO: 218439 - DNA, 607 bp, Canis familiaris; identical to SEQ ID NO: 8332
  misc_feature (146)..(146): n is a, c, g, or t
  misc_feature (269)..(269): n is a, c, g, or t

SEQ ID NO: 218440 - DNA, 609 bp, Canis familiaris; identical to SEQ ID NO: 8333

SEQ ID NO: 218441 - DNA, 622 bp, Canis familiaris; identical to SEQ ID NO: 8334

SEQ ID NO: 218442 - DNA, 622 bp, Canis familiaris; identical to SEQ ID NO: 8335

SEQ ID NO: 218443 - DNA, 963 bp, Canis familiaris; identical to SEQ ID NO: 8336

SEQ ID NO: 218444 - DNA, 280 bp, Canis familiaris; identical to SEQ ID NO: 8337

SEQ ID NO: 218445 - DNA, 616 bp, Canis familiaris; identical to SEQ ID NO: 8338

SEQ ID NO: 218446 - DNA, 641 bp, Canis familiaris; identical to SEQ ID NO: 8339
  misc_feature (104)..(105): n is a, c, g, or t
  misc_feature (192)..(192): n is a, c, g, or t

SEQ ID NO: 218447 - DNA, 450 bp, Canis familiaris; identical to SEQ ID NO: 8340

SEQ ID NO: 218448 - DNA, 657 bp, Canis familiaris; identical to SEQ ID NO: 8341

SEQ ID NO: 218449 - DNA, 702 bp, Canis familiaris; identical to SEQ ID NO: 8342

SEQ ID NO: 218450 - DNA, 647 bp, Canis familiaris; identical to SEQ ID NO: 8343

SEQ ID NO: 218451 - DNA, 672 bp, Canis familiaris; identical to SEQ ID NO: 8344

SEQ ID NO: 218452 - DNA, 573 bp, Canis familiaris; identical to SEQ ID NO: 8345
  misc_feature (228)..(228): n is a, c, g, or t

SEQ ID NO: 218453 - DNA, 835 bp, Canis familiaris; identical to SEQ ID NO: 8346
  misc_feature (2)..(2): n is a, c, g, or t

SEQ ID NO: 218454 - DNA, 538 bp, Canis familiaris; identical to SEQ ID NO: 8347

SEQ ID NO: 218455 - DNA, 450 bp, Canis familiaris; identical to SEQ ID NO: 8348

SEQ ID NO: 218456 - DNA, 579 bp, Canis familiaris; identical to SEQ ID NO: 8349

SEQ ID NO: 218457 - DNA, 576 bp, Canis familiaris; identical to SEQ ID NO: 8350

SEQ ID NO: 218458 - DNA, 610 bp, Canis familiaris; identical to SEQ ID NO: 8351

SEQ ID NO: 218459 - DNA, 525 bp, Canis familiaris; identical to SEQ ID NO: 8352
  misc_feature (1)..(1): n is a, c, g, or t

SEQ ID NO: 218460 - DNA, 663 bp, Canis familiaris; identical to SEQ ID NO: 8353

SEQ ID NO: 218461 - DNA, 230 bp, Canis familiaris; identical to SEQ ID NO: 8354

SEQ ID NO: 218462 - DNA, 682 bp, Canis familiaris; identical to SEQ ID NO: 8355

SEQ ID NO: 218463 - DNA, 592 bp, Canis familiaris; identical to SEQ ID NO: 8356

SEQ ID NO: 218464 - DNA, 540 bp, Canis familiaris; identical to SEQ ID NO: 8357

SEQ ID NO: 218465 - DNA, 573 bp, Canis familiaris; identical to SEQ ID NO: 8358

SEQ ID NO: 218466 - DNA, 641 bp, Canis familiaris; identical to SEQ ID NO: 8359

SEQ ID NO: 218467 - DNA, 617 bp, Canis familiaris; identical to SEQ ID NO: 8360

SEQ ID NO: 218468 - DNA, 650 bp, Canis familiaris; identical to SEQ ID NO: 8361

SEQ ID NO: 218469 - DNA, 527 bp, Canis familiaris; identical to SEQ ID NO: 8362

SEQ ID NO: 218470 - DNA, 651 bp, Canis familiaris; identical to SEQ ID NO: 8363

SEQ ID NO: 218471 - DNA, 622 bp, Canis familiaris; identical to SEQ ID NO: 8364

SEQ ID NO: 218472 - DNA, 587 bp, Canis familiaris; identical to SEQ ID NO: 8365

SEQ ID NO: 218473 - DNA, 583 bp, Canis familiaris; identical to SEQ ID NO: 8366

SEQ ID NO: 218474 - DNA, 570 bp, Canis familiaris; identical to SEQ ID NO: 8367
  misc_feature (315)..(315): n is a, c, g, or t

SEQ ID NO: 218475 - DNA, 594 bp, Canis familiaris; identical to SEQ ID NO: 8368

SEQ ID NO: 218476 - DNA, 587 bp, Canis familiaris; identical to SEQ ID NO: 8369

SEQ ID NO: 218477 - DNA, 660 bp, Canis familiaris; identical to SEQ ID NO: 8370

SEQ ID NO: 218478 - DNA, 719 bp, Canis familiaris; identical to SEQ ID NO: 8371
  misc_feature (1)..(1): n is a, c, g, or t
  misc_feature (51)..(51): n is a, c, g, or t

SEQ ID NO: 218479 - DNA, 278 bp, Canis familiaris; identical to SEQ ID NO: 8372

SEQ ID NO: 218480 - DNA, 425 bp, Canis familiaris; identical to SEQ ID NO: 8373
  misc_feature (1)..(1): n is a, c, g, or t

SEQ ID NO: 218481 - DNA, 629 bp, Canis familiaris; identical to SEQ ID NO: 8374
  misc_feature (50)..(50): n is a, c, g, or t

SEQ ID NO: 218482 - DNA, 632 bp, Canis familiaris; identical to SEQ ID NO: 8375

SEQ ID NO: 218483 - DNA, 453 bp, Canis familiaris; identical to SEQ ID NO: 8376

SEQ ID NO: 218484 - DNA, 561 bp, Canis familiaris; identical to SEQ ID NO: 8377

SEQ ID NO: 218485 - DNA, 508 bp, Canis familiaris; identical to SEQ ID NO: 8378

SEQ ID NO: 218486 - DNA, 397 bp, Canis familiaris; identical to SEQ ID NO: 8379
  misc_feature (30)..(31): n is a, c, g, or t
  misc_feature (36)..(37): n is a, c, g, or t
  misc_feature (39)..(39): n is a, c, g, or t
  misc_feature (51)..(51): n is a, c, g, or t
  misc_feature (62)..(62): n is a, c, g, or t
  misc_feature (68)..(69): n is a, c, g, or t
  misc_feature (73)..(73): n is a, c, g, or t
  misc_feature (79)..(79): n is a, c, g, or t
  misc_feature (82)..(82): n is a, c, g, or t
  misc_feature (88)..(88): n is a, c, g, or t
  misc_feature (90)..(90): n is a, c, g, or t
  misc_feature (96)..(96): n is a, c, g, or t
  misc_feature (98)..(98): n is a, c, g, or t
  misc_feature (113)..(113): n is a, c, g, or t

SEQ ID NO: 218487 - DNA, 553 bp, Canis familiaris; identical to SEQ ID NO: 8380

SEQ ID NO: 218488 - DNA, 611 bp, Canis familiaris; identical to SEQ ID NO: 8381

SEQ ID NO: 218489 - DNA, 579 bp, Canis familiaris; identical to SEQ ID NO: 8382

SEQ ID NO: 218490 - DNA, 621 bp, Canis familiaris; identical to SEQ ID NO: 8383

SEQ ID NO: 218491 - DNA, 675 bp, Canis familiaris; identical to SEQ ID NO: 8384

SEQ ID NO: 218492 - DNA, 613 bp, Canis familiaris; identical to SEQ ID NO: 8385

SEQ ID NO: 218493 - DNA, 608 bp, Canis familiaris; identical to SEQ ID NO: 8386

SEQ ID NO: 218494 - DNA, 609 bp, Canis familiaris; identical to SEQ ID NO: 8387

SEQ ID NO: 218495 - DNA, 123 bp, Canis familiaris; identical to SEQ ID NO: 8388

SEQ ID NO: 218496 - DNA, 655 bp, Canis familiaris; identical to SEQ ID NO: 8389

SEQ ID NO: 218497 - DNA, 630 bp, Canis familiaris; identical to SEQ ID NO: 8390

SEQ ID NO: 218498 - DNA, 589 bp, Canis familiaris; identical to SEQ ID NO: 8391

SEQ ID NO: 218499 - DNA, 687 bp, Canis familiaris; identical to SEQ ID NO: 8392

SEQ ID NO: 218500 - DNA, 572 bp, Canis familiaris; identical to SEQ ID NO: 8393

SEQ ID NO: 218501 - DNA, 439 bp, Canis familiaris; identical to SEQ ID NO: 8394
  misc_feature (57)..(57): n is a, c, g, or t

SEQ ID NO: 218502 - DNA, 633 bp, Canis familiaris; identical to SEQ ID NO: 8395

SEQ ID NO: 218503 - DNA, 692 bp, Canis familiaris; identical to SEQ ID NO: 8396

SEQ ID NO: 218504 - DNA, 634 bp, Canis familiaris; identical to SEQ ID NO: 8397
  misc_feature (59)..(59): n is a, c, g, or t
  misc_feature (137)..(137): n is a, c, g, or t

SEQ ID NO: 218505 - DNA, 380 bp, Canis familiaris; identical to SEQ ID NO: 8398

SEQ ID NO: 218506 - DNA, 580 bp, Canis familiaris; identical to SEQ ID NO: 8399

SEQ ID NO: 218507 - DNA, 604 bp, Canis familiaris; identical to SEQ ID NO: 8400

SEQ ID NO: 218508 - DNA, 462 bp, Canis familiaris; identical to SEQ ID NO: 8401

SEQ ID NO: 218509 - DNA, 650 bp, Canis familiaris; identical to SEQ ID NO: 8402

SEQ ID NO: 218510 - DNA, 516 bp, Canis familiaris; identical to SEQ ID NO: 8403

SEQ ID NO: 218511 - DNA, 615 bp, Canis familiaris; identical to SEQ ID NO: 8404

SEQ ID NO: 218512 - DNA, 561 bp, Canis familiaris; identical to SEQ ID NO: 8405

SEQ ID NO: 218513 - DNA, 586 bp, Canis familiaris; identical to SEQ ID NO: 8406

SEQ ID NO: 218514 - DNA, 630 bp, Canis familiaris; identical to SEQ ID NO: 8407

SEQ ID NO: 218515 - DNA, 154 bp, Canis familiaris; identical to SEQ ID NO: 8408

SEQ ID NO: 218516 - DNA, 596 bp, Canis familiaris; identical to SEQ ID NO: 8409

SEQ ID NO: 218517 - DNA, 510 bp, Canis familiaris; identical to SEQ ID NO: 8410

SEQ ID NO: 218518 - DNA, 594 bp, Canis familiaris; identical to SEQ ID NO: 8411

SEQ ID NO: 218519 - DNA, 689 bp, Canis familiaris; identical to SEQ ID NO: 8412

SEQ ID NO: 218520 - DNA, 611 bp, Canis familiaris; identical to SEQ ID NO: 8413
  misc_feature (562)..(562): n is a, c, g, or t

SEQ ID NO: 218521 - DNA, 676 bp, Canis familiaris; identical to SEQ ID NO: 8414

SEQ ID NO: 218522 - DNA, 621 bp, Canis familiaris; identical to SEQ ID NO: 8415

SEQ ID NO: 218523 - DNA, 574 bp, Canis familiaris; identical to SEQ ID NO: 8416

SEQ ID NO: 218524 - DNA, 626 bp, Canis familiaris; identical to SEQ ID NO: 8417

SEQ ID NO: 218525 - DNA, 639 bp, Canis familiaris; identical to SEQ ID NO: 8418

SEQ ID NO: 218526 - DNA, 658 bp, Canis familiaris; identical to SEQ ID NO: 8419

SEQ ID NO: 218527 - DNA, 555 bp, Canis familiaris; identical to SEQ ID NO: 8420

SEQ ID NO: 218528 - DNA, 688 bp, Canis familiaris; identical to SEQ ID NO: 8421

SEQ ID NO: 218529 - DNA, 592 bp, Canis familiaris; identical to SEQ ID NO: 8422

SEQ ID NO: 218530 - DNA, 399 bp, Canis familiaris; identical to SEQ ID NO: 8423

SEQ ID NO: 218531 - DNA, 597 bp, Canis familiaris; identical to SEQ ID NO: 8424

SEQ ID NO: 218532 - DNA, 512 bp, Canis familiaris; identical to SEQ ID NO: 8425

SEQ ID NO: 218533 - DNA, 148 bp, Canis familiaris; identical to SEQ ID NO: 8426

SEQ ID NO: 218534 - DNA, 606 bp, Canis familiaris; identical to SEQ ID NO: 8427

SEQ ID NO: 218535 - DNA, 529 bp, Canis familiaris; identical to SEQ ID NO: 8428

SEQ ID NO: 218536 - DNA, 236 bp, Canis familiaris; identical to SEQ ID NO: 8429

SEQ ID NO: 218537 - DNA, 618 bp, Canis familiaris; identical to SEQ ID NO: 8430

SEQ ID NO: 218538 - DNA, 605 bp, Canis familiaris; identical to SEQ ID NO: 8431

SEQ ID NO: 218539 - DNA, 552 bp, Canis familiaris; identical to SEQ ID NO: 8432

SEQ ID NO: 218540 - DNA, 656 bp, Canis familiaris; identical to SEQ ID NO: 8433

SEQ ID NO: 218541 - DNA, 101 bp, Canis familiaris; identical to SEQ ID NO: 8434

SEQ ID NO: 218542 - DNA, 471 bp, Canis familiaris; identical to SEQ ID NO: 8435

SEQ ID NO: 218543 - DNA, 535 bp, Canis familiaris; identical to SEQ ID NO: 8436
  misc_feature (125)..(125): n is a, c, g, or t

SEQ ID NO: 218544 - DNA, 610 bp, Canis familiaris; identical to SEQ ID NO: 8437

SEQ ID NO: 218545 - DNA, 569 bp, Canis familiaris; identical to SEQ ID NO: 8438

SEQ ID NO: 218546 - DNA, 601 bp, Canis familiaris; identical to SEQ ID NO: 8439

SEQ ID NO: 218547 - DNA, 549 bp, Canis familiaris; identical to SEQ ID NO: 8440

SEQ ID NO: 218548 - DNA, 572 bp, Canis familiaris; identical to SEQ ID NO: 8441

SEQ ID NO: 218549 - DNA, 386 bp, Canis familiaris; identical to SEQ ID NO: 8442

SEQ ID NO: 218550 - DNA, 618 bp, Canis familiaris; identical to SEQ ID NO: 8443

SEQ ID NO: 218551 - DNA, 595 bp, Canis familiaris; identical to SEQ ID NO: 8444

SEQ ID NO: 218552 - DNA, 645 bp, Canis familiaris; identical to SEQ ID NO: 8445

SEQ ID NO: 218553 - DNA, 605 bp, Canis familiaris; identical to SEQ ID NO: 8446
  misc_feature (83)..(83): n is a, c, g, or t

SEQ ID NO: 218554 - DNA, 588 bp, Canis familiaris; identical to SEQ ID NO: 8447

SEQ ID NO: 218555 - DNA, 628 bp, Canis familiaris; identical to SEQ ID NO: 8448

SEQ ID NO: 218556 - DNA, 630 bp, Canis familiaris; identical to SEQ ID NO: 8449

SEQ ID NO: 218557 - DNA, 566 bp, Canis familiaris; identical to SEQ ID NO: 8450

SEQ ID NO: 218558 - DNA, 560 bp, Canis familiaris; identical to SEQ ID NO: 8451

SEQ ID NO: 218559 - DNA, 585 bp, Canis familiaris; identical to SEQ ID NO: 8452
  misc_feature (56)..(56): n is a, c, g, or t

SEQ ID NO: 218560 - DNA, 625 bp, Canis familiaris; identical to SEQ ID NO: 8453

SEQ ID NO: 218561 - DNA, 648 bp, Canis familiaris; identical to SEQ ID NO: 8454

SEQ ID NO: 218562 - DNA, 592 bp, Canis familiaris; identical to SEQ ID NO: 8455

SEQ ID NO: 218563 - DNA, 714 bp, Canis familiaris; identical to SEQ ID NO: 8456

SEQ ID NO: 218564 - DNA, 650 bp, Canis familiaris; identical to SEQ ID NO: 8457
  misc_feature (3)..(3): n is a, c, g, or t
  misc_feature (39)..(40): n is a, c, g, or t

SEQ ID NO: 218565 - DNA, 319 bp, Canis familiaris; identical to SEQ ID NO: 8458

SEQ ID NO: 218566 - DNA, 659 bp, Canis familiaris; identical to SEQ ID NO: 8459

SEQ ID NO: 218567 - DNA, 709 bp, Canis familiaris; identical to SEQ ID NO: 8460

SEQ ID NO: 218568 - DNA, 298 bp, Canis familiaris; identical to SEQ ID NO: 8461
  misc_feature (295)..(295): n is a, c, g, or t

SEQ ID NO: 218569 - DNA, 563 bp, Canis familiaris; identical to SEQ ID NO: 8462

SEQ ID NO: 218570 - DNA, 452 bp, Canis familiaris; identical to SEQ ID NO: 8463

SEQ ID NO: 218571 - DNA, 495 bp, Canis familiaris; identical to SEQ ID NO: 8464

SEQ ID NO: 218572 - DNA, 317 bp, Canis familiaris; identical to SEQ ID NO: 8465

SEQ ID NO: 218573 - DNA, 626 bp, Canis familiaris; identical to SEQ ID NO: 8466

SEQ ID NO: 218574 - DNA, 582 bp, Canis familiaris; identical to SEQ ID NO: 8467
  misc_feature (99)..(99): n is a, c, g, or t
  misc_feature (191)..(191): n is a, c, g, or t
  misc_feature (206)..(206): n is a, c, g, or t
  misc_feature (254)..(254): n is a, c, g, or t
  misc_feature (304)..(305): n is a, c, g, or t

SEQ ID NO: 218575 - DNA, 458 bp, Canis familiaris; identical to SEQ ID NO: 8468

SEQ ID NO: 218576 - DNA, 616 bp, Canis familiaris; identical to SEQ ID NO: 8469

SEQ ID NO: 218577 - DNA, 642 bp, Canis familiaris; identical to SEQ ID NO: 8470
  misc_feature (1)..(1): n is a, c, g, or t

SEQ ID NO: 218578 - DNA, 685 bp, Canis familiaris; identical to SEQ ID NO: 8471

SEQ ID NO: 218579 - DNA, 659 bp, Canis familiaris; identical to SEQ ID NO: 8472

SEQ ID NO: 218580 - DNA, 116 bp, Canis familiaris; identical to SEQ ID NO: 8473

SEQ ID NO: 218581 - DNA, 507 bp, Canis familiaris; identical to SEQ ID NO: 8474
  misc_feature (297)..(297): n is a, c, g, or t
  misc_feature (314)..(314): n is a, c, g, or t

SEQ ID NO: 218582 - DNA, 752 bp, Canis familiaris; identical to SEQ ID NO: 8475

SEQ ID NO: 218583 - DNA, 629 bp, Canis familiaris; identical to SEQ ID NO: 8476

SEQ ID NO: 218584 - DNA, 131 bp, Canis familiaris; identical to SEQ ID NO: 8477

SEQ ID NO: 218585 - DNA, 625 bp, Canis familiaris; identical to SEQ ID NO: 8478

SEQ ID NO: 218586 - DNA, 660 bp, Canis familiaris; identical to SEQ ID NO: 8479

SEQ ID NO: 218587 - DNA, 629 bp, Canis familiaris; identical to SEQ ID NO: 8480

SEQ ID NO: 218588 - DNA, 552 bp, Canis familiaris; identical to SEQ ID NO: 8481
  misc_feature (95)..(95): n is a, c, g, or t
  misc_feature (141)..(142): n is a, c, g, or t

SEQ ID NO: 218589 - DNA, 676 bp, Canis familiaris; identical to SEQ ID NO: 8482

SEQ ID NO: 218590 - DNA, 609 bp, Canis familiaris; identical to SEQ ID NO: 8483

SEQ ID NO: 218591 - DNA, 338 bp, Canis familiaris; identical to SEQ ID NO: 8484

SEQ ID NO: 218592 - DNA, 514 bp, Canis familiaris; identical to SEQ ID NO: 8485

SEQ ID NO: 218593 - DNA, 631 bp, Canis familiaris; identical to SEQ ID NO: 8486

SEQ ID NO: 218594 - DNA, 613 bp, Canis familiaris; identical to SEQ ID NO: 8487
  misc_feature (1)..(1): n is a, c, g, or t

SEQ ID NO: 218595 - DNA, 379 bp, Canis familiaris; identical to SEQ ID NO: 8488

SEQ ID NO: 218596 - DNA, 605 bp, Canis familiaris; identical to SEQ ID NO: 8489

SEQ ID NO: 218597 - DNA, 634 bp, Canis familiaris; identical to SEQ ID NO: 8490
  misc_feature (325)..(325): n is a, c, g, or t

SEQ ID NO: 218598 - DNA, 585 bp, Canis familiaris; identical to SEQ ID NO: 8491

SEQ ID NO: 218599 - DNA, 660 bp, Canis familiaris; identical to SEQ ID NO: 8492

SEQ ID NO: 218600 - DNA, 570 bp, Canis familiaris; identical to SEQ ID NO: 8493

SEQ ID NO: 218601 - DNA, 614 bp, Canis familiaris; identical to SEQ ID NO: 8494

SEQ ID NO: 218602 - DNA, 546 bp, Canis familiaris; identical to SEQ ID NO: 8495

SEQ ID NO: 218603 - DNA, 670 bp, Canis familiaris; identical to SEQ ID NO: 8496
  misc_feature (34)..(34): n is a, c, g, or t
  misc_feature (150)..(150): n is a, c, g, or t

SEQ ID NO: 218604 - DNA, 620 bp, Canis familiaris; identical to SEQ ID NO: 8497

SEQ ID NO: 218605 - DNA, 665 bp, Canis familiaris; identical to SEQ ID NO: 8498

SEQ ID NO: 218606 - DNA, 458 bp, Canis familiaris; identical to SEQ ID NO: 8499

SEQ ID NO: 218607 - DNA, 353 bp, Canis familiaris; identical to SEQ ID NO: 8500

SEQ ID NO: 218608 - DNA, 574 bp, Canis familiaris; identical to SEQ ID NO: 8501

SEQ ID NO: 218609 - DNA, 680 bp, Canis familiaris; identical to SEQ ID NO: 8502

SEQ ID NO: 218610 - DNA, 621 bp, Canis familiaris; identical to SEQ ID NO: 8503

SEQ ID NO: 218611 - DNA, 690 bp, Canis familiaris; identical to SEQ ID NO: 8504

SEQ ID NO: 218612 - DNA, 659 bp, Canis familiaris; identical to SEQ ID NO: 8505

SEQ ID NO: 218613 - DNA, 575 bp, Canis familiaris; identical to SEQ ID NO: 8506

SEQ ID NO: 218614 - DNA, 684 bp, Canis familiaris; identical to SEQ ID NO: 8507

SEQ ID NO: 218615 - DNA, 634 bp, Canis familiaris; identical to SEQ ID NO: 8508
  misc_feature (113)..(113): n is a, c, g, or t

SEQ ID NO: 218616 - DNA, 495 bp, Canis familiaris; identical to SEQ ID NO: 8509

SEQ ID NO: 218617 - DNA, 641 bp, Canis familiaris; identical to SEQ ID NO: 8510

SEQ ID NO: 218618 - DNA, 659 bp, Canis familiaris; identical to SEQ ID NO: 8511

SEQ ID NO: 218619 - DNA, 628 bp, Canis familiaris; identical to SEQ ID NO: 8512
  misc_feature (45)..(45): n is a, c, g, or t

SEQ ID NO: 218620 - DNA, 649 bp, Canis familiaris; identical to SEQ ID NO: 8513

SEQ ID NO: 218621 - DNA, 594 bp, Canis familiaris; identical to SEQ ID NO: 8514
  misc_feature (151)..(151): n is a, c, g, or t

SEQ ID NO: 218622 - DNA, 663 bp, Canis familiaris; identical to SEQ ID NO: 8515
  misc_feature (29)..(29): n is a, c, g, or t

SEQ ID NO: 218623 - DNA, 539 bp, Canis familiaris; identical to SEQ ID NO: 8516

SEQ ID NO: 218624 - DNA, 577 bp, Canis familiaris; identical to SEQ ID NO: 8517

SEQ ID NO: 218625 - DNA, 673 bp, Canis familiaris; identical to SEQ ID NO: 8518
  misc_feature (1)..(1): n is a, c, g, or t

SEQ ID NO: 218626 - DNA, 634 bp, Canis familiaris; identical to SEQ ID NO: 8519

SEQ ID NO: 218627 - DNA, 640 bp, Canis familiaris; identical to SEQ ID NO: 8520

SEQ ID NO: 218628 - DNA, 640 bp, Canis familiaris; identical to SEQ ID NO: 8521

SEQ ID NO: 218629 - DNA, 674 bp, Canis familiaris; identical to SEQ ID NO: 8522

SEQ ID NO: 218630 - DNA, 685 bp, Canis familiaris; identical to SEQ ID NO: 8523
  misc_feature (644)..(644): n is a, c, g, or t

SEQ ID NO: 218631 - DNA, 746 bp, Canis familiaris; identical to SEQ ID NO: 8524

SEQ ID NO: 218632 - DNA, 594 bp, Canis familiaris; identical to SEQ ID NO: 8525

SEQ ID NO: 218633 - DNA, 644 bp, Canis familiaris; identical to SEQ ID NO: 8526

SEQ ID NO: 218634 - DNA, 581 bp, Canis familiaris; identical to SEQ ID NO: 8527

SEQ ID NO: 218635 - DNA, 629 bp, Canis familiaris; identical to SEQ ID NO: 8528

SEQ ID NO: 218636 - DNA, 606 bp, Canis familiaris; identical to SEQ ID NO: 8529
  misc_feature (57)..(57): n is a, c, g, or t

SEQ ID NO: 218637 - DNA, 675 bp, Canis familiaris; identical to SEQ ID NO: 8530

SEQ ID NO: 218638 - DNA, 641 bp, Canis familiaris; identical to SEQ ID NO: 8531
  misc_feature (65)..(65): n is a, c, g, or t

SEQ ID NO: 218639 - DNA, 603 bp, Canis familiaris; identical to SEQ ID NO: 8532

SEQ ID NO: 218640 - DNA, 441 bp, Canis familiaris; identical to SEQ ID NO: 8533

SEQ ID NO: 218641 - DNA, 633 bp, Canis familiaris; identical to SEQ ID NO: 8534
  misc_feature (363)..(363): n is a, c, g, or t

SEQ ID NO: 218642 - DNA, 604 bp, Canis familiaris; identical to SEQ ID NO: 8535
  misc_feature (1)..(1): n is a, c, g, or t

SEQ ID NO: 218643 - DNA, 498 bp, Canis familiaris; identical to SEQ ID NO: 8536

SEQ ID NO: 218644 - DNA, 610 bp, Canis familiaris; identical to SEQ ID NO: 8537

SEQ ID NO: 218645 - DNA, 587 bp, Canis familiaris; identical to SEQ ID NO: 8538

SEQ ID NO: 218646 - DNA, 699 bp, Canis familiaris; identical to SEQ ID NO: 8539

SEQ ID NO: 218647 - DNA, 665 bp, Canis familiaris; identical to SEQ ID NO: 8540

SEQ ID NO: 218648 - DNA, 607 bp, Canis familiaris; identical to SEQ ID NO: 8541

SEQ ID NO: 218649 - DNA, 679 bp, Canis familiaris; identical to SEQ ID NO: 8542

SEQ ID NO: 218650 - DNA, 628 bp, Canis familiaris; identical to SEQ ID NO: 8543

SEQ ID NO: 218651 - DNA, 535 bp, Canis familiaris; identical to SEQ ID NO: 8544

SEQ ID NO: 218652 - DNA, 666 bp, Canis familiaris; identical to SEQ ID NO: 8545

SEQ ID NO: 218653 - DNA, 567 bp, Canis familiaris; identical to SEQ ID NO: 8546

SEQ ID NO: 218654 - DNA, 680 bp, Canis familiaris; identical to SEQ ID NO: 8547

SEQ ID NO: 218655 - DNA, 555 bp, Canis familiaris; identical to SEQ ID NO: 8548

SEQ ID NO: 218656 - DNA, 665 bp, Canis familiaris; identical to SEQ ID NO: 8549

SEQ ID NO: 218657 - DNA, 622 bp, Canis familiaris; identical to SEQ ID NO: 8550

SEQ ID NO: 218658 - DNA, 631 bp, Canis familiaris; identical to SEQ ID NO: 8551
  misc_feature (399)..(399): n is a, c, g, or t

SEQ ID NO: 218659 - DNA, 586 bp, Canis familiaris; identical to SEQ ID NO: 8552
  misc_feature (407)..(407): n is a, c, g, or t

SEQ ID NO: 218660 - DNA, 618 bp, Canis familiaris; identical to SEQ ID NO: 8553

SEQ ID NO: 218661 - DNA, 225 bp, Canis familiaris; identical to SEQ ID NO: 8554

SEQ ID NO: 218662 - DNA, 567 bp, Canis familiaris; identical to SEQ ID NO: 8555

SEQ ID NO: 218663 - DNA, 628 bp, Canis familiaris; identical to SEQ ID NO: 8556

SEQ ID NO: 218664 - DNA, 658 bp, Canis familiaris; identical to SEQ ID NO: 8557

SEQ ID NO: 218665 - DNA, 617 bp, Canis familiaris; identical to SEQ ID NO: 8558

SEQ ID NO: 218666 - DNA, 601 bp, Canis familiaris; identical to SEQ ID NO: 8559

SEQ ID NO: 218667 - DNA, 646 bp, Canis familiaris; identical to SEQ ID NO: 8560

SEQ ID NO: 218668 - DNA, 655 bp, Canis familiaris; identical to SEQ ID NO: 8561

SEQ ID NO: 218669 - DNA, 528 bp, Canis familiaris; identical to SEQ ID NO: 8562

SEQ ID NO: 218670 - DNA, 613 bp, Canis familiaris; identical to SEQ ID NO: 8563

SEQ ID NO: 218671 - DNA, 660 bp, Canis familiaris; identical to SEQ ID NO: 8564

SEQ ID NO: 218672 - DNA, 656 bp, Canis familiaris; identical to SEQ ID NO: 8565

SEQ ID NO: 218673 - DNA, 630 bp, Canis familiaris; identical to SEQ ID NO: 8566
  misc_feature (39)..(39): n is a, c, g, or t

SEQ ID NO: 218674 - DNA, 696 bp, Canis familiaris; identical to SEQ ID NO: 8567
  misc_feature (1)..(1): n is a, c, g, or t

SEQ ID NO: 218675 - DNA, 527 bp, Canis familiaris; identical to SEQ ID NO: 8568

SEQ ID NO: 218676 - DNA, 560 bp, Canis familiaris; identical to SEQ ID NO: 8569

SEQ ID NO: 218677 - DNA, 575 bp, Canis familiaris; identical to SEQ ID NO: 8570

SEQ ID NO: 218678 - DNA, 624 bp, Canis familiaris; identical to SEQ ID NO: 8571
  misc_feature (1)..(1): n is a, c, g, or t

SEQ ID NO: 218679 - DNA, 591 bp, Canis familiaris; identical to SEQ ID NO: 8572
  misc_feature (1)..(1): n is a, c, g, or t

SEQ ID NO: 218680 - DNA, 603 bp, Canis familiaris; identical to SEQ ID NO: 8573

SEQ ID NO: 218681 - DNA, 538 bp, Canis familiaris; identical to SEQ ID NO: 8574

SEQ ID NO: 218682 - DNA, 603 bp, Canis familiaris; identical to SEQ ID NO: 8575

SEQ ID NO: 218683 - DNA, 676 bp, Canis familiaris; identical to SEQ ID NO: 8576

SEQ ID NO: 218684 - DNA, 566 bp, Canis familiaris; identical to SEQ ID NO: 8577
  misc_feature (322)..(322): n is a, c, g, or t

SEQ ID NO: 218685 - DNA, 614 bp, Canis familiaris; identical to SEQ ID NO: 8578

SEQ ID NO: 218686 - DNA, 623 bp, Canis familiaris; identical to SEQ ID NO: 8579
  misc_feature (20)..(20): n is a, c, g, or t

SEQ ID NO: 218687 - DNA, 624 bp, Canis familiaris; identical to SEQ ID NO: 8580

SEQ ID NO: 218688 - DNA, 658 bp, Canis familiaris; identical to SEQ ID NO: 8581
  misc_feature (141)..(141): n is a, c, g, or t

SEQ ID NO: 218689 - DNA, 603 bp, Canis familiaris; identical to SEQ ID NO: 8582

SEQ ID NO: 218690 - DNA, 617 bp, Canis familiaris; identical to SEQ ID NO: 8583

SEQ ID NO: 218691 - DNA, 636 bp, Canis familiaris; identical to SEQ ID NO: 8584
  misc_feature (407)..(407): n is a, c, g, or t

SEQ ID NO: 218692 - DNA, 427 bp, Canis familiaris; identical to SEQ ID NO: 8585

SEQ ID NO: 218693 - DNA, 656 bp, Canis familiaris; identical to SEQ ID NO: 8586

SEQ ID NO: 218694 - DNA, 662 bp, Canis familiaris; identical to SEQ ID NO: 8587

SEQ ID NO: 218695 - DNA, 616 bp, Canis familiaris; identical to SEQ ID NO: 8588

SEQ ID NO: 218696 - DNA, 619 bp, Canis familiaris; identical to SEQ ID NO: 8589

SEQ ID NO: 218697 - DNA, 665 bp, Canis familiaris; identical to SEQ ID NO: 8590
  misc_feature (138)..(138): n is a, c, g, or t
  misc_feature (155)..(155): n is a, c, g, or t

SEQ ID NO: 218698 - DNA, 575 bp, Canis familiaris; identical to SEQ ID NO: 8591

SEQ ID NO: 218699 - DNA, 612 bp, Canis familiaris; identical to SEQ ID NO: 8592

SEQ ID NO: 218700 - DNA, 591 bp, Canis familiaris; identical to SEQ ID NO: 8593

SEQ ID NO: 218701 - DNA, 639 bp, Canis familiaris; identical to SEQ ID NO: 8594
  misc_feature (10)..(10): n is a, c, g, or t
  misc_feature (86)..(86): n is a, c, g, or t

SEQ ID NO: 218702 - DNA, 646 bp, Canis familiaris; identical to SEQ ID NO: 8595

SEQ ID NO: 218703 - DNA, 631 bp, Canis familiaris; identical to SEQ ID NO: 8596

SEQ ID NO: 218704 - DNA, 604 bp, Canis familiaris; identical to SEQ ID NO: 8597
  misc_feature (335)..(335): n is a, c, g, or t

SEQ ID NO: 218705 - DNA, 467 bp, Canis familiaris; identical to SEQ ID NO: 8598
  misc_feature (20)..(20): n is a, c, g, or t
  misc_feature (28)..(29): n is a, c, g, or t
  misc_feature (31)..(31): n is a, c, g, or t
  misc_feature (81)..(81): n is a, c, g, or t

SEQ ID NO: 218706 - DNA, 623 bp, Canis familiaris; identical to SEQ ID NO: 8599
  misc_feature (4)..(4): n is a, c, g, or t

SEQ ID NO: 218707 - DNA, 362 bp, Canis familiaris; identical to SEQ ID NO: 8600
  misc_feature (1)..(1): n is a, c, g, or t

SEQ ID NO: 218708 - DNA, 587 bp, Canis familiaris; identical to SEQ ID NO: 8601

SEQ ID NO: 218709 - DNA, 629 bp, Canis familiaris; identical to SEQ ID NO: 8602

SEQ ID NO: 218710 - DNA, 344 bp, Canis familiaris; identical to SEQ ID NO: 8603

SEQ ID NO: 218711 - DNA, 732 bp, Canis familiaris; identical to SEQ ID NO: 8604
  misc_feature (193)..(193): n is a, c, g, or t
  misc_feature (209)..(209): n is a, c, g, or t
  misc_feature (215)..(215): n is a, c, g, or t
  misc_feature (277)..(277): n is a, c, g, or t
  misc_feature (297)..(297): n is a, c, g, or t
  misc_feature (570)..(570): n is a, c, g, or t

SEQ ID NO: 218712 - DNA, 603 bp, Canis familiaris; identical to SEQ ID NO: 8605

SEQ ID NO: 218713 - DNA, 618 bp, Canis familiaris; identical to SEQ ID NO: 8606
  misc_feature (170)..(170): n is a, c, g, or t
  misc_feature (206)..(206): n is a, c, g, or t
  misc_feature (224)..(224): n is a, c, g, or t
  misc_feature (269)..(269): n is a, c, g, or t
  misc_feature (286)..(287): n is a, c, g, or t

SEQ ID NO: 218714 - DNA, 656 bp, Canis familiaris; identical to SEQ ID NO: 8607
  misc_feature (194)..(194): n is a, c, g, or t
  misc_feature (260)..(261): n is a, c, g, or t

SEQ ID NO: 218715 - DNA, 564 bp, Canis familiaris; identical to SEQ ID NO: 8608

SEQ ID NO: 218716 - DNA, 453 bp, Canis familiaris; identical to SEQ ID NO: 8609

SEQ ID NO: 218717 - DNA, 596 bp, Canis familiaris; identical to SEQ ID NO: 8610

SEQ ID NO: 218718 - DNA, 631 bp, Canis familiaris; identical to SEQ ID NO: 8611
  misc_feature (276)..(276): n is a, c, g, or t

SEQ ID NO: 218719 - DNA, 636 bp, Canis familiaris; identical to SEQ ID NO: 8612

SEQ ID NO: 218720 - DNA, 500 bp, Canis familiaris; identical to SEQ ID NO: 8613
  misc_feature (1)..(1): n is a, c, g, or t

SEQ ID NO: 218721 - DNA, 411 bp, Canis familiaris; identical to SEQ ID NO: 8614

SEQ ID NO: 218722 - DNA, 610 bp, Canis familiaris; identical to SEQ ID NO: 8615

SEQ ID NO: 218723 - DNA, 333 bp, Canis familiaris; identical to SEQ ID NO: 8616

SEQ ID NO: 218724 - DNA, 618 bp, Canis familiaris; identical to SEQ ID NO: 8617

SEQ ID NO: 218725 - DNA, 402 bp, Canis familiaris; identical to SEQ ID NO: 8618

SEQ ID NO: 218726 - DNA, 367 bp, Canis familiaris; identical to SEQ ID NO: 8619
  misc_feature (322)..(322): n is a, c, g, or t

SEQ ID NO: 218727 - DNA, 619 bp, Canis familiaris; identical to SEQ ID NO: 8620
  misc_feature (1)..(1): n is a, c, g, or t
  misc_feature (169)..(169): n is a, c, g, or t

SEQ ID NO: 218728 - DNA, 456 bp, Canis familiaris; identical to SEQ ID NO: 8621
  misc_feature (225)..(225): n is a, c, g, or t

SEQ ID NO: 218729 - DNA, 568 bp, Canis familiaris; identical to SEQ ID NO: 8622

SEQ ID NO: 218730 - DNA, 592 bp, Canis familiaris; identical to SEQ ID NO: 8623

SEQ ID NO: 218731 - DNA, 544 bp, Canis familiaris; identical to SEQ ID NO: 8624

SEQ ID NO: 218732 - DNA, 694 bp, Canis familiaris; identical to SEQ ID NO: 8625

SEQ ID NO: 218733 - DNA, 582 bp, Canis familiaris; identical to SEQ ID NO: 8626

SEQ ID NO: 218734 - DNA, 639 bp, Canis familiaris; identical to SEQ ID NO: 8627

SEQ ID NO: 218735 - DNA, 631 bp, Canis familiaris; identical to SEQ ID NO: 8628
  misc_feature (93)..(93): n is a, c, g, or t

SEQ ID NO: 218736 - DNA, 616 bp, Canis familiaris; identical to SEQ ID NO: 8629

SEQ ID NO: 218737 - DNA, 596 bp, Canis familiaris; identical to SEQ ID NO: 8630

SEQ ID NO: 218738 - DNA, 664 bp, Canis familiaris; identical to SEQ ID NO: 8631
  misc_feature (1)..(1): n is a, c, g, or t

SEQ ID NO: 218739 - DNA, 545 bp, Canis familiaris; identical to SEQ ID NO: 8632
  misc_feature (70)..(70): n is a, c, g, or t

SEQ ID NO: 218740 - DNA, 555 bp, Canis familiaris; identical to SEQ ID NO: 8633

SEQ ID NO: 218741 - DNA, 621 bp, Canis familiaris; identical to SEQ ID NO: 8634
  misc_feature (1)..(1): n is a, c, g, or t

SEQ ID NO: 218742 - DNA, 536 bp, Canis familiaris; identical to SEQ ID NO: 8635

SEQ ID NO: 218743 - DNA, 519 bp, Canis familiaris; identical to SEQ ID NO: 8636
  misc_feature (384)..(384): n is a, c, g, or t

SEQ ID NO: 218744 - DNA, 142 bp, Canis familiaris; identical to SEQ ID NO: 8637

SEQ ID NO: 218745 - DNA, 647 bp, Canis familiaris; identical to SEQ ID NO: 8638

SEQ ID NO: 218746 - DNA, 575 bp, Canis familiaris; identical to SEQ ID NO: 8639

SEQ ID NO: 218747 - DNA, 568 bp, Canis familiaris; identical to SEQ ID NO: 8640

SEQ ID NO: 218748 - DNA, 600 bp, Canis familiaris; identical to SEQ ID NO: 8641

SEQ ID NO: 218749 - DNA, 491 bp, Canis familiaris; identical to SEQ ID NO: 8642

SEQ ID NO: 218750 - DNA, 556 bp, Canis familiaris; identical to SEQ ID NO: 8643
  misc_feature (260)..(260): n is a, c, g, or t

SEQ ID NO: 218751 - DNA, 611 bp, Canis familiaris; identical to SEQ ID NO: 8644
  misc_feature (42)..(42): n is a, c, g, or t

SEQ ID NO: 218752 - DNA, 626 bp, Canis familiaris; identical to SEQ ID NO: 8645

SEQ ID NO: 218753 - DNA, 652 bp, Canis familiaris; identical to SEQ ID NO: 8646

SEQ ID NO: 218754 - DNA, 630 bp, Canis familiaris; identical to SEQ ID NO: 8647

SEQ ID NO: 218755 - DNA, 323 bp, Canis familiaris; identical to SEQ ID NO: 8648

SEQ ID NO: 218756 - DNA, 674 bp, Canis familiaris; identical to SEQ ID NO: 8649
  misc_feature (423)..(423): n is a, c, g, or t

SEQ ID NO: 218757 - DNA, 641 bp, Canis familiaris; identical to SEQ ID NO: 8650

SEQ ID NO: 218758 - DNA, 705 bp, Canis familiaris; identical to SEQ ID NO: 8651

SEQ ID NO: 218759 - DNA, 617 bp, Canis familiaris; identical to SEQ ID NO: 8652

SEQ ID NO: 218760 - DNA, 649 bp, Canis familiaris; identical to SEQ ID NO: 8653
  misc_feature (7)..(7): n is a, c, g, or t

SEQ ID NO: 218761 - DNA, 216 bp, Canis familiaris; identical to SEQ ID NO: 8654

SEQ ID NO: 218762 - DNA, 511 bp, Canis familiaris; identical to SEQ ID NO: 8655

SEQ ID NO: 218763 - DNA, 572 bp, Canis familiaris; identical to SEQ ID NO: 8656

SEQ ID NO: 218764 - DNA, 604 bp, Canis familiaris; identical to SEQ ID NO: 8657

SEQ ID NO: 218765 - DNA, 589 bp, Canis familiaris; identical to SEQ ID NO: 8658

SEQ ID NO: 218766 - DNA, 663 bp, Canis familiaris; identical to SEQ ID NO: 8659
  misc_feature (1)..(1): n is a, c, g, or t

SEQ ID NO: 218767 - DNA, 386 bp, Canis familiaris; identical to SEQ ID NO: 8660
  misc_feature (1)..(1): n is a, c, g, or t

SEQ ID NO: 218768 - DNA, 641 bp, Canis familiaris; identical to SEQ ID NO: 8661

SEQ ID NO: 218769 - DNA, 596 bp, Canis familiaris; identical to SEQ ID NO: 8662

SEQ ID NO: 218770 - DNA, 607 bp, Canis familiaris; identical to SEQ ID NO: 8663
  misc_feature (1)..(1): n is a, c, g, or t

SEQ ID NO: 218771 - DNA, 520 bp, Canis familiaris; identical to SEQ ID NO: 8664

SEQ ID NO: 218772 - DNA, 706 bp, Canis familiaris; identical to SEQ ID NO: 8665
  misc_feature (117)..(117): n is a, c, g, or t

SEQ ID NO: 218773 - DNA, 617 bp, Canis familiaris; identical to SEQ ID NO: 8666

SEQ ID NO: 218774 - DNA, 682 bp, Canis familiaris; identical to SEQ ID NO: 8667
  misc_feature (10)..(10): n is a, c, g, or t

SEQ ID NO: 218775 - DNA, 646 bp, Canis familiaris; identical to SEQ ID NO: 8668

SEQ ID NO: 218776 - DNA, 565 bp, Canis familiaris; identical to SEQ ID NO: 8669

SEQ ID NO: 218777 - DNA, 504 bp, Canis familiaris; identical to SEQ ID NO: 8670
  misc_feature (363)..(363): n is a, c, g, or t

SEQ ID NO: 218778 - DNA, 705 bp, Canis familiaris; identical to SEQ ID NO: 8671

SEQ ID NO: 218779 - DNA, 567 bp, Canis familiaris; identical to SEQ ID NO: 8672

SEQ ID NO: 218780 - DNA, 733 bp, Canis familiaris; identical to SEQ ID NO: 8673

SEQ ID NO: 218781 - DNA, 700 bp, Canis familiaris; identical to SEQ ID NO: 8674

SEQ ID NO: 218782 - DNA, 569 bp, Canis familiaris; identical to SEQ ID NO: 8675

SEQ ID NO: 218783 - DNA, 664 bp, Canis familiaris; identical to SEQ ID NO: 8676
  misc_feature (110)..(110): n is a, c, g, or t

SEQ ID NO: 218784 - DNA, 619 bp, Canis familiaris; identical to SEQ ID NO: 8677

SEQ ID NO: 218785 - DNA, 596 bp, Canis familiaris; identical to SEQ ID NO: 8678
  misc_feature (51)..(51): n is a, c, g, or t

SEQ ID NO: 218786 - DNA, 422 bp, Canis familiaris; identical to SEQ ID NO: 8679

SEQ ID NO: 218787 - DNA, 613 bp, Canis familiaris; identical to SEQ ID NO: 8680

SEQ ID NO: 218788 - DNA, 563 bp, Canis familiaris; identical to SEQ ID NO: 8681
  misc_feature (186)..(186): n is a, c, g, or t

SEQ ID NO: 218789 - DNA, 601 bp, Canis familiaris; identical to SEQ ID NO: 8682

SEQ ID NO: 218790 - DNA, 592 bp, Canis familiaris; identical to SEQ ID NO: 8683

SEQ ID NO: 218791 - DNA, 632 bp, Canis familiaris; identical to SEQ ID NO: 8684

SEQ ID NO: 218792 - DNA, 681 bp, Canis familiaris; identical to SEQ ID NO: 8685

SEQ ID NO: 218793 - DNA, 564 bp, Canis familiaris; identical to SEQ ID NO: 8686

SEQ ID NO: 218794 - DNA, 716 bp, Canis familiaris; identical to SEQ ID NO: 8687

SEQ ID NO: 218795 - DNA, 558 bp, Canis familiaris; identical to SEQ ID NO: 8688

SEQ ID NO: 218796 - DNA, 628 bp, Canis familiaris; identical to SEQ ID NO: 8689

SEQ ID NO: 218797 - DNA, 673 bp, Canis familiaris; identical to SEQ ID NO: 8690

SEQ ID NO: 218798 - DNA, 676 bp, Canis familiaris; identical to SEQ ID NO: 8691

SEQ ID NO: 218799 - DNA, 497 bp, Canis familiaris; identical to SEQ ID NO: 8692

SEQ ID NO: 218800 - DNA, 465 bp, Canis familiaris; identical to SEQ ID NO: 8693

SEQ ID NO: 218801 - DNA, 639 bp, Canis familiaris; identical to SEQ ID NO: 8694
  misc_feature (227)..(228): n is a, c, g, or t

SEQ ID NO: 218802 - DNA, 588 bp, Canis familiaris; identical to SEQ ID NO: 8695

SEQ ID NO: 218803 - DNA, 583 bp, Canis familiaris; identical to SEQ ID NO: 8696
  misc_feature (5)..(5): n is a, c, g, or t

SEQ ID NO: 218804 - DNA, 557 bp, Canis familiaris; identical to SEQ ID NO: 8697

SEQ ID NO: 218805 - DNA, 603 bp, Canis familiaris; identical to SEQ ID NO: 8698
  misc_feature (355)..(355): n is a, c, g, or t

SEQ ID NO: 218806 - DNA, 591 bp, Canis familiaris; identical to SEQ ID NO: 8699

SEQ ID NO: 218807 - DNA, 601 bp, Canis familiaris; identical to SEQ ID NO: 8700

SEQ ID NO: 218808 - DNA, 611 bp, Canis familiaris; identical to SEQ ID NO: 8701

SEQ ID NO: 218809 - DNA, 646 bp, Canis familiaris; identical to SEQ ID NO: 8702

SEQ ID NO: 218810 - DNA, 605 bp, Canis familiaris; identical to SEQ ID NO: 8703

SEQ ID NO: 218811 - DNA, 618 bp, Canis familiaris; identical to SEQ ID NO: 8704

SEQ ID NO: 218812 - DNA, 630 bp, Canis familiaris; identical to SEQ ID NO: 8705

SEQ ID NO: 218813 - DNA, 525 bp, Canis familiaris; identical to SEQ ID NO: 8706

SEQ ID NO: 218814 - DNA, 593 bp, Canis familiaris; identical to SEQ ID NO: 8707

SEQ ID NO: 218815 - DNA, 691 bp, Canis familiaris; identical to SEQ ID NO: 8708

SEQ ID NO: 218816 - DNA, 606 bp, Canis familiaris; identical to SEQ ID NO: 8709

SEQ ID NO: 218817 - DNA, 559 bp, Canis familiaris; identical to SEQ ID NO: 8710
  misc_feature (34)..(34): n is a, c, g, or t

SEQ ID NO: 218818 - DNA, 443 bp, Canis familiaris; identical to SEQ ID NO: 8711

SEQ ID NO: 218819 - DNA, 406 bp, Canis familiaris; identical to SEQ ID NO: 8712

SEQ ID NO: 218820 - DNA, 594 bp, Canis familiaris; identical to SEQ ID NO: 8713

SEQ ID NO: 218821 - DNA, 577 bp, Canis familiaris; identical to SEQ ID NO: 8714

SEQ ID NO: 218822 - DNA, 636 bp, Canis familiaris; identical to SEQ ID NO: 8715
  misc_feature (38)..(38): n is a, c, g, or t

SEQ ID NO: 218823 - DNA, 652 bp, Canis familiaris; identical to SEQ ID NO: 8716

SEQ ID NO: 218824 - DNA, 649 bp, Canis familiaris; identical to SEQ ID NO: 8717

SEQ ID NO: 218825 - DNA, 496 bp, Canis familiaris; identical to SEQ ID NO: 8718

SEQ ID NO: 218826 - DNA, 698 bp, Canis familiaris; identical to SEQ ID NO: 8719

SEQ ID NO: 218827 - DNA, 579 bp, Canis familiaris; identical to SEQ ID NO: 8720

SEQ ID NO: 218828 - DNA, 571 bp, Canis familiaris; identical to SEQ ID NO: 8721

SEQ ID NO: 218829 - DNA, 656 bp, Canis familiaris; identical to SEQ ID NO: 8722

SEQ ID NO: 218830 - DNA, 556 bp, Canis familiaris; identical to SEQ ID NO: 8723

SEQ ID NO: 218831 - DNA, 640 bp, Canis familiaris; identical to SEQ ID NO: 8724

SEQ ID NO: 218832 - DNA, 651 bp, Canis familiaris; identical to SEQ ID NO: 8725

SEQ ID NO: 218833 - DNA, 612 bp, Canis familiaris; identical to SEQ ID NO: 8726
  misc_feature (1)..(1): n is a, c, g, or t

SEQ ID NO: 218834 - DNA, 610 bp, Canis familiaris; identical to SEQ ID NO: 8727

SEQ ID NO: 218835 - DNA, 658 bp, Canis familiaris; identical to SEQ ID NO: 8728

SEQ ID NO: 218836 - DNA, 593 bp, Canis familiaris; identical to SEQ ID NO: 8729

SEQ ID NO: 218837 - DNA, 645 bp, Canis familiaris; identical to SEQ ID NO: 8730

SEQ ID NO: 218838 - DNA, 637 bp, Canis familiaris; identical to SEQ ID NO: 8731

SEQ ID NO: 218839 - DNA, 632 bp, Canis familiaris; identical to SEQ ID NO: 8732

SEQ ID NO: 218840 - DNA, 588 bp, Canis familiaris; identical to SEQ ID NO: 8733

SEQ ID NO: 218841 - DNA, 242 bp, Canis familiaris; identical to SEQ ID NO: 8734

SEQ ID NO: 218842 - DNA, 595 bp, Canis familiaris; identical to SEQ ID NO: 8735

SEQ ID NO: 218843 - DNA, 608 bp, Canis familiaris; identical to SEQ ID NO: 8736

SEQ ID NO: 218844 - DNA, 663 bp, Canis familiaris; identical to SEQ ID NO: 8737
  misc_feature (236)..(236): n is a, c, g, or t

SEQ ID NO: 218845 - DNA, 609 bp, Canis familiaris; identical to SEQ ID NO: 8738

SEQ ID NO: 218846 - DNA, 632 bp, Canis familiaris; identical to SEQ ID NO: 8739

SEQ ID NO: 218847 - DNA, 588 bp, Canis familiaris; identical to SEQ ID NO: 8740

SEQ ID NO: 218848 - DNA, 610 bp, Canis familiaris; identical to SEQ ID NO: 8741

SEQ ID NO: 218849 - DNA, 523 bp, Canis familiaris; identical to SEQ ID NO: 8742

SEQ ID NO: 218850 - DNA, 543 bp, Canis familiaris; identical to SEQ ID NO: 8743
  misc_feature (86)..(86): n is a, c, g, or t

SEQ ID NO: 218851 - DNA, 562 bp, Canis familiaris; identical to SEQ ID NO: 8744

SEQ ID NO: 218852 - DNA, 531 bp, Canis familiaris; identical to SEQ ID NO: 8745
  misc_feature (38)..(38): n is a, c, g, or t

SEQ ID NO: 218853 - DNA, 653 bp, Canis familiaris; identical to SEQ ID NO: 8746

SEQ ID NO: 218854 - DNA, 590 bp, Canis familiaris; identical to SEQ ID NO: 8747

SEQ ID NO: 218855 - DNA, 629 bp, Canis familiaris; identical to SEQ ID NO: 8748

SEQ ID NO: 218856 - DNA, 586 bp, Canis familiaris; identical to SEQ ID NO: 8749

SEQ ID NO: 218857 - DNA, 645 bp, Canis familiaris; identical to SEQ ID NO: 8750

SEQ ID NO: 218858 - DNA, 661 bp, Canis familiaris; identical to SEQ ID NO: 8751
  misc_feature (1)..(1): n is a, c, g, or t
  misc_feature (387)..(387): n is a, c, g, or t

SEQ ID NO: 218859 - DNA, 649 bp, Canis familiaris; identical to SEQ ID NO: 8752

SEQ ID NO: 218860 - DNA, 660 bp, Canis familiaris; identical to SEQ ID NO: 8753

SEQ ID NO: 218861 - DNA, 454 bp, Canis familiaris; identical to SEQ ID NO: 8754

SEQ ID NO: 218862 - DNA, 432 bp, Canis familiaris; identical to SEQ ID NO: 8755
  misc_feature (126)..(126): n is a, c, g, or t
  misc_feature (171)..(171): n is a, c, g, or t

SEQ ID NO: 218863 - DNA, 162 bp, Canis familiaris; identical to SEQ ID NO: 8756

SEQ ID NO: 218864 - DNA, 216 bp, Canis familiaris; identical to SEQ ID NO: 8757

SEQ ID NO: 218865 - DNA, 236 bp, Canis familiaris; identical to SEQ ID NO: 8758

SEQ ID NO: 218866 - DNA, 309 bp, Canis familiaris; identical to SEQ ID NO: 8759

SEQ ID NO: 218867 - DNA, 632 bp, Canis familiaris; identical to SEQ ID NO: 8760
  misc_feature (188)..(188): n is a, c, g, or t

SEQ ID NO: 218868 - DNA, 510 bp, Canis familiaris; identical to SEQ ID NO: 8761

SEQ ID NO: 218869 - DNA, 504 bp, Canis familiaris; identical to SEQ ID NO: 8762

SEQ ID NO: 218870 - DNA, 123 bp, Canis familiaris; identical to SEQ ID NO: 8763

SEQ ID NO: 218871 - DNA, 513 bp, Canis familiaris; identical to SEQ ID NO: 8764

SEQ ID NO: 218872 - DNA, 607 bp, Canis familiaris; identical to SEQ ID NO: 8765

SEQ ID NO: 218873 - DNA, 462 bp, Canis familiaris; identical to SEQ ID NO: 8766

SEQ ID NO: 218874 - DNA, 486 bp, Canis familiaris; identical to SEQ ID NO: 8767

SEQ ID NO: 218875 - DNA, 446 bp, Canis familiaris; identical to SEQ ID NO: 8768

SEQ ID NO: 218876 - DNA, 509 bp, Canis familiaris; identical to SEQ ID NO: 8769

SEQ ID NO: 218877 - DNA, 602 bp, Canis familiaris; identical to SEQ ID NO: 8770

SEQ ID NO: 218878 - DNA, 609 bp, Canis familiaris; identical to SEQ ID NO: 8771

SEQ ID NO: 218879 - DNA, 179 bp, Canis familiaris; identical to SEQ ID NO: 8772

SEQ ID NO: 218880 - DNA, 413 bp, Canis familiaris; identical to SEQ ID NO: 8773

SEQ ID NO: 218881 - DNA, 649 bp, Canis familiaris; identical to SEQ ID NO: 8774

SEQ ID NO: 218882 - DNA, 625 bp, Canis familiaris; identical to SEQ ID NO: 8775
  misc_feature (333)..(333): n is a, c, g, or t

SEQ ID NO: 218883 - DNA, 596 bp, Canis familiaris; identical to SEQ ID NO: 8776

SEQ ID NO: 218884 - DNA, 464 bp, Canis familiaris; identical to SEQ ID NO: 8777

SEQ ID NO: 218885 - DNA, 510 bp, Canis familiaris; identical to SEQ ID NO: 8778

SEQ ID NO: 218886 - DNA, 624 bp, Canis familiaris; identical to SEQ ID NO: 8779

SEQ ID NO: 218887 - DNA, 554 bp, Canis familiaris; identical to SEQ ID NO: 8780

SEQ ID NO: 218888 - DNA, 642 bp, Canis familiaris; identical to SEQ ID NO: 8781

SEQ ID NO: 218889 - DNA, 676 bp, Canis familiaris; identical to SEQ ID NO: 8782

SEQ ID NO: 218890 - DNA, 564 bp, Canis familiaris; identical to SEQ ID NO: 8783

SEQ ID NO: 218891 - DNA, 646 bp, Canis familiaris; identical to SEQ ID NO: 8784

SEQ ID NO: 218892 - DNA, 494 bp, Canis familiaris; identical to SEQ ID NO: 8785

SEQ ID NO: 218893 - DNA, 677 bp, Canis familiaris; identical to SEQ ID NO: 8786

SEQ ID NO: 218894 - DNA, 518 bp, Canis familiaris; identical to SEQ ID NO: 8787

SEQ ID NO: 218895 - DNA, 656 bp, Canis familiaris; identical to SEQ ID NO: 8788

SEQ ID NO: 218896 - DNA, 633 bp, Canis familiaris; identical to SEQ ID NO: 8789
  misc_feature (80)..(80): n is a, c, g, or t

SEQ ID NO: 218897 - DNA, 604 bp, Canis familiaris; identical to SEQ ID NO: 8790

SEQ ID NO: 218898 - DNA, 480 bp, Canis familiaris; identical to SEQ ID NO: 8791

SEQ ID NO: 218899 - DNA, 547 bp, Canis familiaris; identical to SEQ ID NO: 8792

SEQ ID NO: 218900 - DNA, 648 bp, Canis familiaris; identical to SEQ ID NO: 8793
  misc_feature (28)..(28): n is a, c, g, or t

SEQ ID NO: 218901 - DNA, 618 bp, Canis familiaris; identical to SEQ ID NO: 8794
  misc_feature (186)..(186): n is a, c, g, or t

SEQ ID NO: 218902 - DNA, 479 bp, Canis familiaris; identical to SEQ ID NO: 8795

SEQ ID NO: 218903 - DNA, 549 bp, Canis familiaris; identical to SEQ ID NO: 8796

SEQ ID NO: 218904 - DNA, 610 bp, Canis familiaris; identical to SEQ ID NO: 8797
  misc_feature (186)..(186): n is a, c, g, or t

SEQ ID NO: 218905 - DNA, 638 bp, Canis familiaris; identical to SEQ ID NO: 8798
  misc_feature (96)..(96): n is a, c, g, or t

SEQ ID NO: 218906 - DNA, 590 bp, Canis familiaris; identical to SEQ ID NO: 8799

SEQ ID NO: 218907 - DNA, 606 bp, Canis familiaris; identical to SEQ ID NO: 8800

SEQ ID NO: 218908 - DNA, 595 bp, Canis familiaris; identical to SEQ ID NO: 8801

SEQ ID NO: 218909 - DNA, 700 bp, Canis familiaris; identical to SEQ ID NO: 8802
  misc_feature (18)..(18): n is a, c, g, or t

SEQ ID NO: 218910 - DNA, 570 bp, Canis familiaris; identical to SEQ ID NO: 8803

SEQ ID NO: 218911 - DNA, 630 bp, Canis familiaris; identical to SEQ ID NO: 8804
  misc_feature (1)..(1): n is a, c, g, or t

SEQ ID NO: 218912 - DNA, 501 bp, Canis familiaris; identical to SEQ ID NO: 8805
  misc_feature (1)..(1): n is a, c, g, or t
  misc_feature (34)..(34): n is a, c, g, or t
  misc_feature (53)..(53): n is a, c, g, or t
  misc_feature (60)..(60): n is a, c, g, or t

SEQ ID NO: 218913 - DNA, 592 bp, Canis familiaris; identical to SEQ ID NO: 8806
  misc_feature (6)..(6): n is a, c, g, or t

SEQ ID NO: 218914 - DNA, 637 bp, Canis familiaris; identical to SEQ ID NO: 8807

SEQ ID NO: 218915 - DNA, 608 bp, Canis familiaris; identical to SEQ ID NO: 8808

SEQ ID NO: 218916 - DNA, 311 bp, Canis familiaris; identical to SEQ ID NO: 8809

SEQ ID NO: 218917 - DNA, 647 bp, Canis familiaris; identical to SEQ ID NO: 8810

SEQ ID NO: 218918 - DNA, 557 bp, Canis familiaris; identical to SEQ ID NO: 8811

SEQ ID NO: 218919 - DNA, 615 bp, Canis familiaris; identical to SEQ ID NO: 8812
  misc_feature (1)..(1): n is a, c, g, or t

SEQ ID NO: 218920 - DNA, 630 bp, Canis familiaris; identical to SEQ ID NO: 8813

SEQ ID NO: 218921 - DNA, 532 bp, Canis familiaris; identical to SEQ ID NO: 8814
  misc_feature (1)..(1): n is a, c, g, or t

SEQ ID NO: 218922 - DNA, 293 bp, Canis familiaris; identical to SEQ ID NO: 8815
  misc_feature (1)..(1): n is a, c, g, or t

SEQ ID NO: 218923 - DNA, 630 bp, Canis familiaris; identical to SEQ ID NO: 8816

SEQ ID NO: 218924 - DNA, 495 bp, Canis familiaris; identical to SEQ ID NO: 8817

SEQ ID NO: 218925 - DNA, 543 bp, Canis familiaris; identical to SEQ ID NO: 8818

SEQ ID NO: 218926 - DNA, 628 bp, Canis familiaris; identical to SEQ ID NO: 8819
  misc_feature (623)..(623): n is a, c, g, or t

SEQ ID NO: 218927 - DNA, 655 bp, Canis familiaris; identical to SEQ ID NO: 8820
  misc_feature (440)..(440): n is a, c, g, or t

SEQ ID NO: 218928 - DNA, 586 bp, Canis familiaris; identical to SEQ ID NO: 8821

SEQ ID NO: 218929 - DNA, 624 bp, Canis familiaris; identical to SEQ ID NO: 8822

SEQ ID NO: 218930 - DNA, 620 bp, Canis familiaris; identical to SEQ ID NO: 8823

SEQ ID NO: 218931 - DNA, 617 bp, Canis familiaris; identical to SEQ ID NO: 8824

SEQ ID NO: 218932 - DNA, 536 bp, Canis familiaris; identical to SEQ ID NO: 8825

SEQ ID NO: 218933 - DNA, 616 bp, Canis familiaris; identical to SEQ ID NO: 8826
  misc_feature (1)..(1): n is a, c, g, or t

SEQ ID NO: 218934 - DNA, 601 bp, Canis familiaris; identical to SEQ ID NO: 8827
  misc_feature (428)..(428): n is a, c, g, or t

SEQ ID NO: 218935 - DNA, 675 bp, Canis familiaris; identical to SEQ ID NO: 8828
  misc_feature (121)..(121): n is a, c, g, or t

SEQ ID NO: 218936 - DNA, 645 bp, Canis familiaris; identical to SEQ ID NO: 8829

SEQ ID NO: 218937 - DNA, 620 bp, Canis familiaris; identical to SEQ ID NO: 8830

SEQ ID NO: 218938 - DNA, 612 bp, Canis familiaris; identical to SEQ ID NO: 8831

SEQ ID NO: 218939 - DNA, 420 bp, Canis familiaris; identical to SEQ ID NO: 8832
  misc_feature (98)..(98): n is a, c, g, or t
  misc_feature (166)..(166): n is a, c, g, or t

SEQ ID NO: 218940 - DNA, 740 bp, Canis familiaris; identical to SEQ ID NO: 8833

SEQ ID NO: 218941 - DNA, 630 bp, Canis familiaris; identical to SEQ ID NO: 8834

SEQ ID NO: 218942 - DNA, 666 bp, Canis familiaris; identical to SEQ ID NO: 8835

SEQ ID NO: 218943 - DNA, 395 bp, Canis familiaris; identical to SEQ ID NO: 8836

SEQ ID NO: 218944 - DNA, 941 bp, Canis familiaris; identical to SEQ ID NO: 8837

SEQ ID NO: 218945 - DNA, 656 bp, Canis familiaris; identical to SEQ ID NO: 8838

SEQ ID NO: 218946 - DNA, 630 bp, Canis familiaris; identical to SEQ ID NO: 8839

SEQ ID NO: 218947 - DNA, 300 bp, Canis familiaris; identical to SEQ ID NO: 8840

SEQ ID NO: 218948 - DNA, 705 bp, Canis familiaris; identical to SEQ ID NO: 8841

SEQ ID NO: 218949 - DNA, 658 bp, Canis familiaris; identical to SEQ ID NO: 8842

SEQ ID NO: 218950 - DNA, 680 bp, Canis familiaris; identical to SEQ ID NO: 8843

SEQ ID NO: 218951 - DNA, 522 bp, Canis familiaris; identical to SEQ ID NO: 8844

SEQ ID NO: 218952 - DNA, 616 bp, Canis familiaris; identical to SEQ ID NO: 8845

SEQ ID NO: 218953 - DNA, 713 bp, Canis familiaris; identical to SEQ ID NO: 8846

SEQ ID NO: 218954 - DNA, 436 bp, Canis familiaris; identical to SEQ ID NO: 8847

SEQ ID NO: 218955 - DNA, 545 bp, Canis familiaris; identical to SEQ ID NO: 8848

SEQ ID NO: 218956 - DNA, 344 bp, Canis familiaris; identical to SEQ ID NO: 8849

SEQ ID NO: 218957 - DNA, 600 bp, Canis familiaris; identical to SEQ ID NO: 8850

SEQ ID NO: 218958 - DNA, 274 bp, Canis familiaris; identical to SEQ ID NO: 8851

SEQ ID NO: 218959 - DNA, 591 bp, Canis familiaris; identical to SEQ ID NO: 8852

SEQ ID NO: 218960 - DNA, 731 bp, Canis familiaris; identical to SEQ ID NO: 8853

SEQ ID NO: 218961 - DNA, 370 bp, Canis familiaris; identical to SEQ ID NO: 8854

SEQ ID NO: 218962 - DNA, 551 bp, Canis familiaris; identical to SEQ ID NO: 8855

SEQ ID NO: 218963 - DNA, 638 bp, Canis familiaris; identical to SEQ ID NO: 8856

SEQ ID NO: 218964 - DNA, 117 bp, Canis familiaris; identical to SEQ ID NO: 8857
  misc_feature (1)..(1): n is a, c, g, or t

SEQ ID NO: 218965 - DNA, 600 bp, Canis familiaris; identical to SEQ ID NO: 8858

SEQ ID NO: 218966 - DNA, 700 bp, Canis familiaris; identical to SEQ ID NO: 8859

SEQ ID NO: 218967 - DNA, 649 bp, Canis familiaris; identical to SEQ ID NO: 8860

SEQ ID NO: 218968 - DNA, 586 bp, Canis familiaris; identical to SEQ ID NO: 8861

SEQ ID NO: 218969 - DNA, 472 bp, Canis familiaris; identical to SEQ ID NO: 8862

SEQ ID NO: 218970 - DNA, 637 bp, Canis familiaris; identical to SEQ ID NO: 8863

SEQ ID NO: 218971 - DNA, 666 bp, Canis familiaris; identical to SEQ ID NO: 8864

SEQ ID NO: 218972 - DNA, 621 bp, Canis familiaris; identical to SEQ ID NO: 8865
  misc_feature (1)..(1): n is a, c, g, or t

SEQ ID NO: 218973 - DNA, 616 bp, Canis familiaris; identical to SEQ ID NO: 8866

SEQ ID NO: 218974 - DNA, 522 bp, Canis familiaris; identical to SEQ ID NO: 8867

SEQ ID NO: 218975 - DNA, 646 bp, Canis familiaris; identical to SEQ ID NO: 8868

SEQ ID NO: 218976 - DNA, 463 bp, Canis familiaris; identical to SEQ ID NO: 8869

SEQ ID NO: 218977 - DNA, 379 bp, Canis familiaris; identical to SEQ ID NO: 8870

SEQ ID NO: 218978 - DNA, 630 bp, Canis familiaris; identical to SEQ ID NO: 8871

SEQ ID NO: 218979 - DNA, 541 bp, Canis familiaris; identical to SEQ ID NO: 8872
  misc_feature (1)..(1): n is a, c, g, or t

SEQ ID NO: 218980 - DNA, 682 bp, Canis familiaris; identical to SEQ ID NO: 8873

SEQ ID NO: 218981 - DNA, 519 bp, Canis familiaris; identical to SEQ ID NO: 8874

SEQ ID NO: 218982 - DNA, 555 bp, Canis familiaris; identical to SEQ ID NO: 8875

SEQ ID NO: 218983 - DNA, 573 bp, Canis familiaris; identical to SEQ ID NO: 8876

SEQ ID NO: 218984 - DNA, 505 bp, Canis familiaris; identical to SEQ ID NO: 8877

SEQ ID NO: 218985 - DNA, 589 bp, Canis familiaris; identical to SEQ ID NO: 8878

SEQ ID NO: 218986 - DNA, 610 bp, Canis familiaris; identical to SEQ ID NO: 8879

SEQ ID NO: 218987 - DNA, 628 bp, Canis familiaris; identical to SEQ ID NO: 8880

SEQ ID NO: 218988 - DNA, 670 bp, Canis familiaris; identical to SEQ ID NO: 8881

SEQ ID NO: 218989 - DNA, 512 bp, Canis familiaris; identical to SEQ ID NO: 8882

SEQ ID NO: 218990 - DNA, 623 bp, Canis familiaris; identical to SEQ ID NO: 8883

SEQ ID NO: 218991 - DNA, 652 bp, Canis familiaris; identical to SEQ ID NO: 8884

SEQ ID NO: 218992 - DNA, 576 bp, Canis familiaris; identical to SEQ ID NO: 8885
  misc_feature (226)..(226): n is a, c, g, or t

SEQ ID NO: 218993 - DNA, 571 bp, Canis familiaris; identical to SEQ ID NO: 8886

SEQ ID NO: 218994 - DNA, 289 bp, Canis familiaris; identical to SEQ ID NO: 8887

SEQ ID NO: 218995 - DNA, 479 bp, Canis familiaris; identical to SEQ ID NO: 8888

SEQ ID NO: 218996 - DNA, 656 bp, Canis familiaris; identical to SEQ ID NO: 8889

SEQ ID NO: 218997 - DNA, 539 bp, Canis familiaris; identical to SEQ ID NO: 8890

SEQ ID NO: 218998 - DNA, 522 bp, Canis familiaris; identical to SEQ ID NO: 8891

SEQ ID NO: 218999 - DNA, 621 bp, Canis familiaris; identical to SEQ ID NO: 8892

SEQ ID NO: 219000 - DNA, 599 bp, Canis familiaris; identical to SEQ ID NO: 8893

SEQ ID NO: 219001 - DNA, 556 bp, Canis familiaris; identical to SEQ ID NO: 8894

SEQ ID NO: 219002 - DNA, 615 bp, Canis familiaris; identical to SEQ ID NO: 8895

SEQ ID NO: 219003 - DNA, 475 bp, Canis familiaris; identical to SEQ ID NO: 8896

SEQ ID NO: 219004 - DNA, 473 bp, Canis familiaris; identical to SEQ ID NO: 8897
  misc_feature (124)..(125): n is a, c, g, or t

SEQ ID NO: 219005 - DNA, 622 bp, Canis familiaris; identical to SEQ ID NO: 8898

SEQ ID NO: 219006 - DNA, 501 bp, Canis familiaris; identical to SEQ ID NO: 8899

SEQ ID NO: 219007 - DNA, 608 bp, Canis familiaris; identical to SEQ ID NO: 8900

SEQ ID NO: 219008 - DNA, 603 bp, Canis familiaris; identical to SEQ ID NO: 8901

SEQ ID NO: 219009 - DNA, 381 bp, Canis familiaris; identical to SEQ ID NO: 8902

SEQ ID NO: 219010 - DNA, 590 bp, Canis familiaris; identical to SEQ ID NO: 8903

SEQ ID NO: 219011 - DNA, 531 bp, Canis familiaris; identical to SEQ ID NO: 8904

SEQ ID NO: 219012 - DNA, 402 bp, Canis familiaris; identical to SEQ ID NO: 8905

SEQ ID NO: 219013 - DNA, 134 bp, Canis familiaris; identical to SEQ ID NO: 8906

SEQ ID NO: 219014 - DNA, 703 bp, Canis familiaris; identical to SEQ ID NO: 8907

SEQ ID NO: 219015 - DNA, 637 bp, Canis familiaris; identical to SEQ ID NO: 8908

SEQ ID NO: 219016 - DNA, 303 bp, Canis familiaris; identical to SEQ ID NO: 8909

SEQ ID NO: 219017 - DNA, 289 bp, Canis familiaris; identical to SEQ ID NO: 8910

SEQ ID NO: 219018 - DNA, 117 bp, Canis familiaris; identical to SEQ ID NO: 8911

SEQ ID NO: 219019 - DNA, 487 bp, Canis familiaris; identical to SEQ ID NO: 8912

SEQ ID NO: 219020 - DNA, 481 bp, Canis familiaris; identical to SEQ ID NO: 8913

SEQ ID NO: 219021 - DNA, 706 bp, Canis familiaris; identical to SEQ ID NO: 8914

SEQ ID NO: 219022 - DNA, 651 bp, Canis familiaris; identical to SEQ ID NO: 8915

SEQ ID NO: 219023 - DNA, 201 bp, Canis familiaris; identical to SEQ ID NO: 8916

SEQ ID NO: 219024 - DNA, 729 bp, Canis familiaris; identical to SEQ ID NO: 8917

SEQ ID NO: 219025 - DNA, 638 bp, Canis familiaris; identical to SEQ ID NO: 8918

SEQ ID NO: 219026 - DNA, 515 bp, Canis familiaris; identical to SEQ ID NO: 8919

SEQ ID NO: 219027 - DNA, 100 bp, Canis familiaris; identical to SEQ ID NO: 8920

SEQ ID NO: 219028 - DNA, 125 bp, Canis familiaris; identical to SEQ ID NO: 8921

SEQ ID NO: 219029 - DNA, 561 bp, Canis familiaris; identical to SEQ ID NO: 8922

SEQ ID NO: 219030 - DNA, 366 bp, Canis familiaris; identical to SEQ ID NO: 8923
  misc_feature (345)..(345): n is a, c, g, or t

SEQ ID NO: 219031 - DNA, 283 bp, Canis familiaris; identical to SEQ ID NO: 8924

SEQ ID NO: 219032 - DNA, 608 bp, Canis familiaris; identical to SEQ ID NO: 8925

SEQ ID NO: 219033 - DNA, 112 bp, Canis familiaris; identical to SEQ ID NO: 8926

SEQ ID NO: 219034 - DNA, 749 bp, Canis familiaris; identical to SEQ ID NO: 8927

SEQ ID NO: 219035 - DNA, 103 bp, Canis familiaris; identical to SEQ ID NO: 8928
  misc_feature (1)..(1): n is a, c, g, or t

SEQ ID NO: 219036 - DNA, 585 bp, Canis familiaris; identical to SEQ ID NO: 8929

SEQ ID NO: 219037 - DNA, 665 bp, Canis familiaris; identical to SEQ ID NO: 8930

SEQ ID NO: 219038 - DNA, 580 bp, Canis familiaris; identical to SEQ ID NO: 8931

SEQ ID NO: 219039 - DNA, 650 bp, Canis familiaris; identical to SEQ ID NO: 8932

SEQ ID NO: 219040 - DNA, 602 bp, Canis familiaris; identical to SEQ ID NO: 8933

SEQ ID NO: 219041 - DNA, 663 bp, Canis familiaris; identical to SEQ ID NO: 8934

SEQ ID NO: 219042 - DNA, 703 bp, Canis familiaris; identical to SEQ ID NO: 8935
  misc_feature (43)..(43): n is a, c, g, or t

SEQ ID NO: 219043 - DNA, 422 bp, Canis familiaris; identical to SEQ ID NO: 8936
  misc_feature (53)..(53): n is a, c, g, or t

SEQ ID NO: 219044 - DNA, 521 bp, Canis familiaris; identical to SEQ ID NO: 8937

SEQ ID NO: 219045 - DNA, 563 bp, Canis familiaris; identical to SEQ ID NO: 8938

SEQ ID NO: 219046 - DNA, 644 bp, Canis familiaris; identical to SEQ ID NO: 8939

SEQ ID NO: 219047 - DNA, 624 bp, Canis familiaris; identical to SEQ ID NO: 8940
  misc_feature (479)..(479): n is a, c, g, or t

SEQ ID NO: 219048 - DNA, 563 bp, Canis familiaris; identical to SEQ ID NO: 8941

SEQ ID NO: 219049 - DNA, 654 bp, Canis familiaris; identical to SEQ ID NO: 8942
  misc_feature (41)..(41): n is a, c, g, or t

SEQ ID NO: 219050 - DNA, 646 bp, Canis familiaris; identical to SEQ ID NO: 8943

SEQ ID NO: 219051 - DNA, 624 bp, Canis familiaris; identical to SEQ ID NO: 8944
  misc_feature (1)..(1): n is a, c, g, or t

SEQ ID NO: 219052 - DNA, 693 bp, Canis familiaris; identical to SEQ ID NO: 8945
  misc_feature (1)..(1): n is a, c, g, or t

SEQ ID NO: 219053 - DNA, 432 bp, Canis familiaris; identical to SEQ ID NO: 8946

SEQ ID NO: 219054 - DNA, 655 bp, Canis familiaris; identical to SEQ ID NO: 8947
  misc_feature (292)..(292): n is a, c, g, or t

SEQ ID NO: 219055 - DNA, 645 bp, Canis familiaris; identical to SEQ ID NO: 8948

SEQ ID NO: 219056 - DNA, 383 bp, Canis familiaris; identical to SEQ ID NO: 8949

SEQ ID NO: 219057 - DNA, 538 bp, Canis familiaris; identical to SEQ ID NO: 8950

SEQ ID NO: 219058 - DNA, 547 bp, Canis familiaris; identical to SEQ ID NO: 8951
  misc_feature (394)..(394): n is a, c, g, or t
  misc_feature (422)..(422): n is a, c, g, or t

SEQ ID NO: 219059 - DNA, 440 bp, Canis familiaris; identical to SEQ ID NO: 8952

SEQ ID NO: 219060 - DNA, 649 bp, Canis familiaris; identical to SEQ ID NO: 8953

SEQ ID NO: 219061 - DNA, 605 bp, Canis familiaris; identical to SEQ ID NO: 8954

SEQ ID NO: 219062 - DNA, 267 bp, Canis familiaris; identical to SEQ ID NO: 8955

SEQ ID NO: 219063 - DNA, 463 bp, Canis familiaris; identical to SEQ ID NO: 8956

SEQ ID NO: 219064 - DNA, 601 bp, Canis familiaris; identical to SEQ ID NO: 8957

SEQ ID NO: 219065 - DNA, 205 bp, Canis familiaris; identical to SEQ ID NO: 8958

SEQ ID NO: 219066 - DNA, 591 bp, Canis familiaris; identical to SEQ ID NO: 8959
  misc_feature (411)..(411): n is a, c, g, or t

SEQ ID NO: 219067 - DNA, 285 bp, Canis familiaris; identical to SEQ ID NO: 8960
  misc_feature (12)..(12): n is a, c, g, or t
  misc_feature (50)..(50): n is a, c, g, or t
  misc_feature (150)..(150): n is a, c, g, or t

SEQ ID NO: 219068 - DNA, 693 bp, Canis familiaris; identical to SEQ ID NO: 8961

SEQ ID NO: 219069 - DNA, 636 bp, Canis familiaris; identical to SEQ ID NO: 8962

SEQ ID NO: 219070 - DNA, 446 bp, Canis familiaris; identical to SEQ ID NO: 8963

SEQ ID NO: 219071 - DNA, 638 bp, Canis familiaris; identical to SEQ ID NO: 8964
  misc_feature (1)..(1): n is a, c, g, or t

SEQ ID NO: 219072 - DNA, 701 bp, Canis familiaris; identical to SEQ ID NO: 8965

SEQ ID NO: 219073 - DNA, 645 bp, Canis familiaris; identical to SEQ ID NO: 8966
  misc_feature (509)..(509): n is a, c, g, or t

SEQ ID NO: 219074 - DNA, 610 bp, Canis familiaris; identical to SEQ ID NO: 8967

SEQ ID NO: 219075 - DNA, 686 bp, Canis familiaris; identical to SEQ ID NO: 8968
  misc_feature (252)..(252): n is a, c, g, or t

SEQ ID NO: 219076 - DNA, 453 bp, Canis familiaris; identical to SEQ ID NO: 8969

SEQ ID NO: 219077 - DNA, 681 bp, Canis familiaris; identical to SEQ ID NO: 8970

SEQ ID NO: 219078 - DNA, 618 bp, Canis familiaris; identical to SEQ ID NO: 8971
  misc_feature (343)..(343): n is a, c, g, or t

SEQ ID NO: 219079 - DNA, 609 bp, Canis familiaris; identical to SEQ ID NO: 8972

SEQ ID NO: 219080 - DNA, 210 bp, Canis familiaris; identical to SEQ ID NO: 8973
  misc_feature (1)..(1): n is a, c, g, or t
  misc_feature (3)..(3): n is a, c, g, or t

SEQ ID NO: 219081 - DNA, 558 bp, Canis familiaris; identical to SEQ ID NO: 8974

SEQ ID NO: 219082 - DNA, 666 bp, Canis familiaris; identical to SEQ ID NO: 8975

SEQ ID NO: 219083 - DNA, 534 bp, Canis familiaris; identical to SEQ ID NO: 8976

SEQ ID NO: 219084 - DNA, 639 bp, Canis familiaris; identical to SEQ ID NO: 8977

SEQ ID NO: 219085 - DNA, 621 bp, Canis familiaris; identical to SEQ ID NO: 8978
  misc_feature (1)..(1): n is a, c, g, or t

SEQ ID NO: 219086 - DNA, 634 bp, Canis familiaris; identical to SEQ ID NO: 8979

SEQ ID NO: 219087 - DNA, 697 bp, Canis familiaris; identical to SEQ ID NO: 8980
  misc_feature (83)..(83): n is a, c, g, or t

SEQ ID NO: 219088 - DNA, 601 bp, Canis familiaris; identical to SEQ ID NO: 8981

SEQ ID NO: 219089 - DNA, 705 bp, Canis familiaris; identical to SEQ ID NO: 8982

SEQ ID NO: 219090 - DNA, 642 bp, Canis familiaris; identical to SEQ ID NO: 8983

SEQ ID NO: 219091 - DNA, 250 bp, Canis familiaris; identical to SEQ ID NO: 8984

SEQ ID NO: 219092 - DNA, 548 bp, Canis familiaris; identical to SEQ ID NO: 8985

SEQ ID NO: 219093 - DNA, 613 bp, Canis familiaris; identical to SEQ ID NO: 8986
  misc_feature (400)..(400): n is a, c, g, or t

SEQ ID NO: 219094 - DNA, 606 bp, Canis familiaris; identical to SEQ ID NO: 8987
  misc_feature (180)..(180): n is a, c, g, or t

SEQ ID NO: 219095 - DNA, 314 bp, Canis familiaris; identical to SEQ ID NO: 8988
  misc_feature (1)..(1): n is a, c, g, or t

SEQ ID NO: 219096 - DNA, 638 bp, Canis familiaris; identical to SEQ ID NO: 8989

SEQ ID NO: 219097 - DNA, 544 bp, Canis familiaris; identical to SEQ ID NO: 8990

SEQ ID NO: 219098 - DNA, 691 bp, Canis familiaris; identical to SEQ ID NO: 8991

SEQ ID NO: 219099 - DNA, 637 bp, Canis familiaris; identical to SEQ ID NO: 8992
  misc_feature (26)..(26): n is a, c, g, or t

SEQ ID NO: 219100 - DNA, 644 bp, Canis familiaris; identical to SEQ ID NO: 8993
  misc_feature (169)..(169): n is a, c, g, or t

SEQ ID NO: 219101 - DNA, 742 bp, Canis familiaris; identical to SEQ ID NO: 8994

SEQ ID NO: 219102 - DNA, 616 bp, Canis familiaris; identical to SEQ ID NO: 8995

SEQ ID NO: 219103 - DNA, 202 bp, Canis familiaris; identical to SEQ ID NO: 8996

SEQ ID NO: 219104 - DNA, 569 bp, Canis familiaris; identical to SEQ ID NO: 8997

SEQ ID NO: 219105 - DNA, 596 bp, Canis familiaris; identical to SEQ ID NO: 8998
  misc_feature (10)..(10): n is a, c, g, or t

SEQ ID NO: 219106 - DNA, 625 bp, Canis familiaris; identical to SEQ ID NO: 8999

SEQ ID NO: 219107 - DNA, 679 bp, Canis familiaris; identical to SEQ ID NO: 9000
  misc_feature (59)..(59): n is a, c, g, or t

SEQ ID NO: 219108 - DNA, 560 bp, Canis familiaris; identical to SEQ ID NO: 9001
  misc_feature (271)..(271): n is a, c, g, or t

SEQ ID NO: 219109 - DNA, 703 bp, Canis familiaris; identical to SEQ ID NO: 9002

SEQ ID NO: 219110 - DNA, 625 bp, Canis familiaris; identical to SEQ ID NO: 9003

SEQ ID NO: 219111 - DNA, 596 bp, Canis familiaris; identical to SEQ ID NO: 9004

SEQ ID NO: 219112 - DNA, 613 bp, Canis familiaris; identical to SEQ ID NO: 9005

SEQ ID NO: 219113 - DNA, 666 bp, Canis familiaris; identical to SEQ ID NO: 9006

SEQ ID NO: 219114 - DNA, 597 bp, Canis familiaris; identical to SEQ ID NO: 9007

SEQ ID NO: 219115 - DNA, 702 bp, Canis familiaris; identical to SEQ ID NO: 9008

SEQ ID NO: 219116 - DNA, 654 bp, Canis familiaris; identical to SEQ ID NO: 9009

SEQ ID NO: 219117 - DNA, 628 bp, Canis familiaris; identical to SEQ ID NO: 9010

SEQ ID NO: 219118 - DNA, 605 bp, Canis familiaris; identical to SEQ ID NO: 9011

SEQ ID NO: 219119 - DNA, 553 bp, Canis familiaris; identical to SEQ ID NO: 9012

SEQ ID NO: 219120 - DNA, 560 bp, Canis familiaris; identical to SEQ ID NO: 9013

SEQ ID NO: 219121 - DNA, 430 bp, Canis familiaris; identical to SEQ ID NO: 9014

SEQ ID NO: 219122 - DNA, 427 bp, Canis familiaris; identical to SEQ ID NO: 9015

SEQ ID NO: 219123 - DNA, 582 bp, Canis familiaris; identical to SEQ ID NO: 9016

SEQ ID NO: 219124 - DNA, 524 bp, Canis familiaris; identical to SEQ ID NO: 9017

SEQ ID NO: 219125 - DNA, 585 bp, Canis familiaris; identical to SEQ ID NO: 9018

SEQ ID NO: 219126 - DNA, 107 bp, Canis familiaris; identical to SEQ ID NO: 9019

SEQ ID NO: 219127 - DNA, 546 bp, Canis familiaris; identical to SEQ ID NO: 9020

SEQ ID NO: 219128 - DNA, 621 bp, Canis familiaris; identical to SEQ ID NO: 9021
  misc_feature (1)..(1): n is a, c, g, or t

SEQ ID NO: 219129 - DNA, 535 bp, Canis familiaris; identical to SEQ ID NO: 9022

SEQ ID NO: 219130 - DNA, 587 bp, Canis familiaris; identical to SEQ ID NO: 9023

SEQ ID NO: 219131 - DNA, 547 bp, Canis familiaris; identical to SEQ ID NO: 9024
  misc_feature (1)..(1): n is a, c, g, or t
  misc_feature (168)..(168): n is a, c, g, or t

SEQ ID NO: 219132 - DNA, 610 bp, Canis familiaris; identical to SEQ ID NO: 9025
  misc_feature (393)..(393): n is a, c, g, or t

SEQ ID NO: 219133 - DNA, 615 bp, Canis familiaris; identical to SEQ ID NO: 9026
  misc_feature (278)..(278): n is a, c, g, or t

SEQ ID NO: 219134 - DNA, 659 bp, Canis familiaris; identical to SEQ ID NO: 9027

SEQ ID NO: 219135 - DNA, 576 bp, Canis familiaris; identical to SEQ ID NO: 9028

SEQ ID NO: 219136 - DNA, 528 bp, Canis familiaris; identical to SEQ ID NO: 9029

SEQ ID NO: 219137 - DNA, 611 bp, Canis familiaris; identical to SEQ ID NO: 9030

SEQ ID NO: 219138 - DNA, 562 bp, Canis familiaris; identical to SEQ ID NO: 9031

SEQ ID NO: 219139 - DNA, 625 bp, Canis familiaris; identical to SEQ ID NO: 9032

SEQ ID NO: 219140 - DNA, 656 bp, Canis familiaris; identical to SEQ ID NO: 9033

SEQ ID NO: 219141 - DNA, 654 bp, Canis familiaris; identical to SEQ ID NO: 9034

SEQ ID NO: 219142 - DNA, 734 bp, Canis familiaris; identical to SEQ ID NO: 9035

SEQ ID NO: 219143 - DNA, 634 bp, Canis familiaris; identical to SEQ ID NO: 9036
  misc_feature (1)..(1): n is a, c, g, or t

SEQ ID NO: 219144 - DNA, 643 bp, Canis familiaris; identical to SEQ ID NO: 9037

SEQ ID NO: 219145 - DNA, 580 bp, Canis familiaris; identical to SEQ ID NO: 9038

SEQ ID NO: 219146 - DNA, 588 bp, Canis familiaris; identical to SEQ ID NO: 9039

SEQ ID NO: 219147 - DNA, 706 bp, Canis familiaris; identical to SEQ ID NO: 9040
  misc_feature (67)..(67): n is a, c, g, or t

SEQ ID NO: 219148 - DNA, 473 bp, Canis familiaris; identical to SEQ ID NO: 9041
  misc_feature (1)..(1): n is a, c, g, or t

SEQ ID NO: 219149 - DNA, 390 bp, Canis familiaris; identical to SEQ ID NO: 9042

SEQ ID NO: 219150 - DNA, 679 bp, Canis familiaris; identical to SEQ ID NO: 9043

SEQ ID NO: 219151 - DNA, 552 bp, Canis familiaris; identical to SEQ ID NO: 9044

SEQ ID NO: 219152 - DNA, 463 bp, Canis familiaris; identical to SEQ ID NO: 9045

SEQ ID NO: 219153 - DNA, 458 bp, Canis familiaris; identical to SEQ ID NO: 9046

SEQ ID NO: 219154 - DNA, 619 bp, Canis familiaris; identical to SEQ ID NO: 9047

SEQ ID NO: 219155 - DNA, 626 bp, Canis familiaris; identical to SEQ ID NO: 9048

SEQ ID NO: 219156 - DNA, 559 bp, Canis familiaris; identical to SEQ ID NO: 9049

SEQ ID NO: 219157 - DNA, 591 bp, Canis familiaris; identical to SEQ ID NO: 9050

SEQ ID NO: 219158 - DNA, 551 bp, Canis familiaris; identical to SEQ ID NO: 9051

SEQ ID NO: 219159 - DNA, 642 bp, Canis familiaris; identical to SEQ ID NO: 9052

SEQ ID NO: 219160 - DNA, 514 bp, Canis familiaris; identical to SEQ ID NO: 9053

SEQ ID NO: 219161 - DNA, 318 bp, Canis familiaris; identical to SEQ ID NO: 9054
  misc_feature (49)..(49): n is a, c, g, or t
  misc_feature (111)..(111): n is a, c, g, or t

SEQ ID NO: 219162 - DNA, 595 bp, Canis familiaris; identical to SEQ ID NO: 9055

SEQ ID NO: 219163 - DNA, 545 bp, Canis familiaris; identical to SEQ ID NO: 9056

SEQ ID NO: 219164 - DNA, 506 bp, Canis familiaris; identical to SEQ ID NO: 9057

SEQ ID NO: 219165 - DNA, 537 bp, Canis familiaris; identical to SEQ ID NO: 9058

SEQ ID NO: 219166 - DNA, 501 bp, Canis familiaris; identical to SEQ ID NO: 9059

SEQ ID NO: 219167 - DNA, 674 bp, Canis familiaris; identical to SEQ ID NO: 9060

SEQ ID NO: 219168 - DNA, 685 bp, Canis familiaris; identical to SEQ ID NO: 9061

SEQ ID NO: 219169 - DNA, 636 bp, Canis familiaris; identical to SEQ ID NO: 9062

SEQ ID NO: 219170 - DNA, 753 bp, Canis familiaris; identical to SEQ ID NO: 9063
  misc_feature (121)..(121): n is a, c, g, or t

SEQ ID NO: 219171 - DNA, 694 bp, Canis familiaris; identical to SEQ ID NO: 9064

SEQ ID NO: 219172 - DNA, 573 bp, Canis familiaris; identical to SEQ ID NO: 9065
  misc_feature (83)..(83): n is a, c, g, or t
  misc_feature (152)..(152): n is a, c, g, or t

SEQ ID NO: 219173 - DNA, 707 bp, Canis familiaris; identical to SEQ ID NO: 9066

SEQ ID NO: 219174 - DNA, 655 bp, Canis familiaris; identical to SEQ ID NO: 9067

SEQ ID NO: 219175 - DNA, 660 bp, Canis familiaris; identical to SEQ ID NO: 9068
  misc_feature (2)..(2): n is a, c, g, or t

SEQ ID NO: 219176 - DNA, 603 bp, Canis familiaris; identical to SEQ ID NO: 9069
  misc_feature (582)..(582): n is a, c, g, or t

SEQ ID NO: 219177 - DNA, 552 bp, Canis familiaris; identical to SEQ ID NO: 9070

SEQ ID NO: 219178 - DNA, 716 bp, Canis familiaris; identical to SEQ ID NO: 9071

SEQ ID NO: 219179 - DNA, 641 bp, Canis familiaris; identical to SEQ ID NO: 9072

SEQ ID NO: 219180 - DNA, 540 bp, Canis familiaris; identical to SEQ ID NO: 9073

SEQ ID NO: 219181 - DNA, 715 bp, Canis familiaris; identical to SEQ ID NO: 9074
  misc_feature (125)..(125): n is a, c, g, or t

SEQ ID NO: 219182 - DNA, 612 bp, Canis familiaris; identical to SEQ ID NO: 9075

SEQ ID NO: 219183 - DNA, 646 bp, Canis familiaris; identical to SEQ ID NO: 9076

SEQ ID NO: 219184 - DNA, 626 bp, Canis familiaris; identical to SEQ ID NO: 9077

SEQ ID NO: 219185 - DNA, 520 bp, Canis familiaris; identical to SEQ ID NO: 9078

SEQ ID NO: 219186 - DNA, 604 bp, Canis familiaris; identical to SEQ ID NO: 9079

SEQ ID NO: 219187 - DNA, 562 bp, Canis familiaris; identical to SEQ ID NO: 9080
  misc_feature (227)..(227): n is a, c, g, or t
  misc_feature (232)..(232): n is a, c, g, or t
  misc_feature (245)..(245): n is a, c, g, or t
  misc_feature (253)..(253): n is a, c, g, or t
  misc_feature (255)..(255): n is a, c, g, or t
  misc_feature (374)..(375): n is a, c, g, or t
  misc_feature (397)..(397): n is a, c, g, or t

SEQ ID NO: 219188 - DNA, 580 bp, Canis familiaris; identical to SEQ ID NO: 9081

SEQ ID NO: 219189 - DNA, 677 bp, Canis familiaris; identical to SEQ ID NO: 9082

SEQ ID NO: 219190 - DNA, 563 bp, Canis familiaris; identical to SEQ ID NO: 9083

SEQ ID NO: 219191 - DNA, 635 bp, Canis familiaris; identical to SEQ ID NO: 9084

SEQ ID NO: 219192 - DNA, 142 bp, Canis familiaris; identical to SEQ ID NO: 9085

SEQ ID NO: 219193 - DNA, 129 bp, Canis familiaris; identical to SEQ ID NO: 9086

SEQ ID NO: 219194 - DNA, 626 bp, Canis familiaris; identical to SEQ ID NO: 9087

SEQ ID NO: 219195 - DNA, 654 bp, Canis familiaris; identical to SEQ ID NO: 9088

SEQ ID NO: 219196 - DNA, 388 bp, Canis familiaris; identical to SEQ ID NO: 9089
  misc_feature (107)..(107): n is a, c, g, or t

SEQ ID NO: 219197 - DNA, 485 bp, Canis familiaris; identical to SEQ ID NO: 9090

SEQ ID NO: 219198 - DNA, 648 bp, Canis familiaris; identical to SEQ ID NO: 9091

SEQ ID NO: 219199 - DNA, 338 bp, Canis familiaris; identical to SEQ ID NO: 9092

SEQ ID NO: 219200 - DNA, 622 bp, Canis familiaris; identical to SEQ ID NO: 9093

SEQ ID NO: 219201 - DNA, 650 bp, Canis familiaris; identical to SEQ ID NO: 9094
  misc_feature (314)..(314): n is a, c, g, or t

SEQ ID NO: 219202 - DNA, 651 bp, Canis familiaris; identical to SEQ ID NO: 9095

SEQ ID NO: 219203 - DNA, 377 bp, Canis familiaris; identical to SEQ ID NO: 9096

SEQ ID NO: 219204 - DNA, 383 bp, Canis familiaris; identical to SEQ ID NO: 9097

SEQ ID NO: 219205 - DNA, 580 bp, Canis familiaris; identical to SEQ ID NO: 9098

SEQ ID NO: 219206 - DNA, 434 bp, Canis familiaris; identical to SEQ ID NO: 9099

SEQ ID NO: 219207 - DNA, 653 bp, Canis familiaris; identical to SEQ ID NO: 9100
  misc_feature (21)..(22): n is a, c, g, or t
  misc_feature (35)..(35): n is a, c, g, or t
  misc_feature (63)..(64): n is a, c, g, or t
  misc_feature (130)..(130): n is a, c, g, or t

SEQ ID NO: 219208 - DNA, 400 bp, Canis familiaris; identical to SEQ ID NO: 9101
  misc_feature (68)..(68): n is a, c, g, or t
  misc_feature (81)..(82): n is a, c, g, or t
  misc_feature (84)..(84): n is a, c, g, or t

SEQ ID NO: 219209 - DNA, 625 bp, Canis familiaris; identical to SEQ ID NO: 9102
  misc_feature (38)..(38): n is a, c, g, or t

SEQ ID NO: 219210 - DNA, 258 bp, Canis familiaris; identical to SEQ ID NO: 9103

SEQ ID NO: 219211 - DNA, 443 bp, Canis familiaris; identical to SEQ ID NO: 9104

SEQ ID NO: 219212 - DNA, 597 bp, Canis familiaris; identical to SEQ ID NO: 9105

SEQ ID NO: 219213 - DNA, 643 bp, Canis familiaris; identical to SEQ ID NO: 9106
  misc_feature (1)..(1): n is a, c, g, or t
  misc_feature (152)..(152): n is a, c, g, or t

SEQ ID NO: 219214 - DNA, 323 bp, Canis familiaris; identical to SEQ ID NO: 9107
  misc_feature (1)..(1): n is a, c, g, or t

SEQ ID NO: 219215 - DNA, 325 bp, Canis familiaris; identical to SEQ ID NO: 9108

SEQ ID NO: 219216 - DNA, 548 bp, Canis familiaris; identical to SEQ ID NO: 9109

SEQ ID NO: 219217 - DNA, 700 bp, Canis familiaris; identical to SEQ ID NO: 9110

SEQ ID NO: 219218 - DNA, 712 bp, Canis familiaris; identical to SEQ ID NO: 9111
  misc_feature (109)..(109): n is a, c, g, or t
  misc_feature (236)..(236): n is a, c, g, or t
  misc_feature (501)..(502): n is a, c, g, or t

SEQ ID NO: 219219 - DNA, 621 bp, Canis familiaris; identical to SEQ ID NO: 9112

SEQ ID NO: 219220 - DNA, 629 bp, Canis familiaris; identical to SEQ ID NO: 9113

SEQ ID NO: 219221 - DNA, 388 bp, Canis familiaris; identical to SEQ ID NO: 9114

SEQ ID NO: 219222 - DNA, 624 bp, Canis familiaris; identical to SEQ ID NO: 9115
  misc_feature (310)..(310): n is a, c, g, or t
  misc_feature (342)..(342): n is a, c, g, or t
  misc_feature (360)..(360): n is a, c, g, or t

SEQ ID NO: 219223 - DNA, 620 bp, Canis familiaris; identical to SEQ ID NO: 9116

SEQ ID NO: 219224 - DNA, 257 bp, Canis familiaris; identical to SEQ ID NO: 9117

SEQ ID NO: 219225 - DNA, 650 bp, Canis familiaris; identical to SEQ ID NO: 9118

SEQ ID NO: 219226 - DNA, 620 bp, Canis familiaris; identical to SEQ ID NO: 9119
  misc_feature (552)..(552): n is a, c, g, or t

SEQ ID NO: 219227 - DNA, 574 bp, Canis familiaris; identical to SEQ ID NO: 9120

SEQ ID NO: 219228 - DNA, 544 bp, Canis familiaris; identical to SEQ ID NO: 9121

SEQ ID NO: 219229 - DNA, 340 bp, Canis familiaris; identical to SEQ ID NO: 9122

SEQ ID NO: 219230 - DNA, 608 bp, Canis familiaris; identical to SEQ ID NO: 9123
  misc_feature (1)..(1): n is a, c, g, or t
  misc_feature (401)..(401): n is a, c, g, or t

SEQ ID NO: 219231 - DNA, 643 bp, Canis familiaris; identical to SEQ ID NO: 9124
  misc_feature (304)..(304): n is a, c, g, or t

SEQ ID NO: 219232 - DNA, 621 bp, Canis familiaris; identical to SEQ ID NO: 9125

SEQ ID NO: 219233 - DNA, 366 bp, Canis familiaris; identical to SEQ ID NO: 9126

SEQ ID NO: 219234 - DNA, 156 bp, Canis familiaris; identical to SEQ ID NO: 9127

SEQ ID NO: 219235 - DNA, 560 bp, Canis familiaris; identical to SEQ ID NO: 9128
  misc_feature (1)..(1): n is a, c, g, or t
  misc_feature (129)..(129): n is a, c, g, or t

SEQ ID NO: 219236 - DNA, 523 bp, Canis familiaris; identical to SEQ ID NO: 9129

SEQ ID NO: 219237 - DNA, 627 bp, Canis familiaris; identical to SEQ ID NO: 9130

SEQ ID NO: 219238 - DNA, 623 bp, Canis familiaris; identical to SEQ ID NO: 9131
  misc_feature (109)..(109): n is a, c, g, or t

SEQ ID NO: 219239 - DNA, 582 bp, Canis familiaris; identical to SEQ ID NO: 9132

SEQ ID NO: 219240 - DNA, 499 bp, Canis familiaris; identical to SEQ ID NO: 9133

SEQ ID NO: 219241 - DNA, 585 bp, Canis familiaris; identical to SEQ ID NO: 9134
  misc_feature (1)..(1): n is a, c, g, or t

SEQ ID NO: 219242 - DNA, 557 bp, Canis familiaris; identical to SEQ ID NO: 9135

SEQ ID NO: 219243 - DNA, 580 bp, Canis familiaris; identical to SEQ ID NO: 9136

SEQ ID NO: 219244 - DNA, 697 bp, Canis familiaris; identical to SEQ ID NO: 9137

SEQ ID NO: 219245 - DNA, 649 bp, Canis familiaris; identical to SEQ ID NO: 9138

SEQ ID NO: 219246 - DNA, 550 bp, Canis familiaris; identical to SEQ ID NO: 9139

SEQ ID NO: 219247 - DNA, 554 bp, Canis familiaris; identical to SEQ ID NO: 9140

SEQ ID NO: 219248 - DNA, 610 bp, Canis familiaris; identical to SEQ ID NO: 9141

SEQ ID NO: 219249 - DNA, 565 bp, Canis familiaris; identical to SEQ ID NO: 9142

SEQ ID NO: 219250 - DNA, 599 bp, Canis familiaris; identical to SEQ ID NO: 9143

SEQ ID NO: 219251 - DNA, 141 bp, Canis familiaris; identical to SEQ ID NO: 9144

SEQ ID NO: 219252 - DNA, 612 bp, Canis familiaris; identical to SEQ ID NO: 9145

SEQ ID NO: 219253 - DNA, 590 bp, Canis familiaris; identical to SEQ ID NO: 9146

SEQ ID NO: 219254 - DNA, 647 bp, Canis familiaris; identical to SEQ ID NO: 9147

SEQ ID NO: 219255 - DNA, 597 bp, Canis familiaris; identical to SEQ ID NO: 9148

SEQ ID NO: 219256 - DNA, 604 bp, Canis familiaris; identical to SEQ ID NO: 9149

SEQ ID NO: 219257 - DNA, 578 bp, Canis familiaris; identical to SEQ ID NO: 9150

SEQ ID NO: 219258 - DNA, 499 bp, Canis familiaris; identical to SEQ ID NO: 9151

SEQ ID NO: 219259 - DNA, 607 bp, Canis familiaris; identical to SEQ ID NO: 9152

SEQ ID NO: 219260 - DNA, 644 bp, Canis familiaris; identical to SEQ ID NO: 9153

SEQ ID NO: 219261 - DNA, 398 bp, Canis familiaris; identical to SEQ ID NO: 9154

SEQ ID NO: 219262 - DNA, 538 bp, Canis familiaris; identical to SEQ ID NO: 9155

SEQ ID NO: 219263 - DNA, 675 bp, Canis familiaris; identical to SEQ ID NO: 9156

SEQ ID NO: 219264 - DNA, 303 bp, Canis familiaris; identical to SEQ ID NO: 9157

SEQ ID NO: 219265 - DNA, 485 bp, Canis familiaris; identical to SEQ ID NO: 9158

SEQ ID NO: 219266 - DNA, 645 bp, Canis familiaris; identical to SEQ ID NO: 9159

SEQ ID NO: 219267 - DNA, 560 bp, Canis familiaris; identical to SEQ ID NO: 9160

SEQ ID NO: 219268 - DNA, 642 bp, Canis familiaris; identical to SEQ ID NO: 9161

SEQ ID NO: 219269 - DNA, 682 bp, Canis familiaris; identical to SEQ ID NO: 9162
  misc_feature (102)..(102): n is a, c, g, or t

SEQ ID NO: 219270 - DNA, 626 bp, Canis familiaris; identical to SEQ ID NO: 9163

SEQ ID NO: 219271 - DNA, 675 bp, Canis familiaris; identical to SEQ ID NO: 9164

SEQ ID NO: 219272 - DNA, 700 bp, Canis familiaris; identical to SEQ ID NO: 9165

SEQ ID NO: 219273 - DNA, 572 bp, Canis familiaris; identical to SEQ ID NO: 9166

SEQ ID NO: 219274 - DNA, 700 bp, Canis familiaris; identical to SEQ ID NO: 9167
  misc_feature (2)..(2): n is a, c, g, or t

SEQ ID NO: 219275 - DNA, 422 bp, Canis familiaris; identical to SEQ ID NO: 9168

SEQ ID NO: 219276 - DNA, 628 bp, Canis familiaris; identical to SEQ ID NO: 9169

SEQ ID NO: 219277 - DNA, 664 bp, Canis familiaris; identical to SEQ ID NO: 9170
  misc_feature (296)..(296): n is a, c, g, or t
  misc_feature (392)..(392): n is a, c, g, or t

SEQ ID NO: 219278 - DNA, 398 bp, Canis familiaris; identical to SEQ ID NO: 9171
  misc_feature (253)..(254): n is a, c, g, or t

SEQ ID NO: 219279 - DNA, 524 bp, Canis familiaris; identical to SEQ ID NO: 9172

SEQ ID NO: 219280 - DNA, 630 bp, Canis familiaris; identical to SEQ ID NO: 9173

SEQ ID NO: 219281 - DNA, 652 bp, Canis familiaris; identical to SEQ ID NO: 9174

SEQ ID NO: 219282 - DNA, 596 bp, Canis familiaris; identical to SEQ ID NO: 9175

SEQ ID NO: 219283 - DNA, 630 bp, Canis familiaris; identical to SEQ ID NO: 9176

SEQ ID NO: 219284 - DNA, 591 bp, Canis familiaris; identical to SEQ ID NO: 9177

SEQ ID NO: 219285 - DNA, 596 bp, Canis familiaris; identical to SEQ ID NO: 9178

SEQ ID NO: 219286 - DNA, 608 bp, Canis familiaris; identical to SEQ ID NO: 9179

SEQ ID NO: 219287 - DNA, 592 bp, Canis familiaris; identical to SEQ ID NO: 9180

SEQ ID NO: 219288 - DNA, 624 bp, Canis familiaris; identical to SEQ ID NO: 9181

SEQ ID NO: 219289 - DNA, 107 bp, Canis familiaris; identical to SEQ ID NO: 9182

SEQ ID NO: 219290 - DNA, 604 bp, Canis familiaris; identical to SEQ ID NO: 9183

SEQ ID NO: 219291 - DNA, 626 bp, Canis familiaris; identical to SEQ ID NO: 9184

SEQ ID NO: 219292 - DNA, 627 bp, Canis familiaris; identical to SEQ ID NO: 9185

SEQ ID NO: 219293 - DNA, 448 bp, Canis familiaris; identical to SEQ ID NO: 9186

SEQ ID NO: 219294 - DNA, 593 bp, Canis familiaris; identical to SEQ ID NO: 9187

SEQ ID NO: 219295 - DNA, 609 bp, Canis familiaris; identical to SEQ ID NO: 9188

SEQ ID NO: 219296 - DNA, 579 bp, Canis familiaris; identical to SEQ ID NO: 9189

SEQ ID NO: 219297 - DNA, 415 bp, Canis familiaris; identical to SEQ ID NO: 9190

SEQ ID NO: 219298 - DNA, 550 bp, Canis familiaris; identical to SEQ ID NO: 9191

SEQ ID NO: 219299 - DNA, 446 bp, Canis familiaris; identical to SEQ ID NO: 9192
  misc_feature (1)..(1): n is a, c, g, or t
  misc_feature (86)..(86): n is a, c, g, or t

SEQ ID NO: 219300 - DNA, 630 bp, Canis familiaris; identical to SEQ ID NO: 9193

SEQ ID NO: 219301 - DNA, 660 bp, Canis familiaris; identical to SEQ ID NO: 9194

SEQ ID NO: 219302 - DNA, 495 bp, Canis familiaris; identical to SEQ ID NO: 9195

SEQ ID NO: 219303 - DNA, 559 bp, Canis familiaris; identical to SEQ ID NO: 9196

SEQ ID NO: 219304 - DNA, 623 bp, Canis familiaris; identical to SEQ ID NO: 9197

SEQ ID NO: 219305 - DNA, 643 bp, Canis familiaris; identical to SEQ ID NO: 9198

SEQ ID NO: 219306 - DNA, 615 bp, Canis familiaris; identical to SEQ ID NO: 9199
  misc_feature (141)..(141): n is a, c, g, or t
  misc_feature (151)..(151): n is a, c, g, or t

SEQ ID NO: 219307 - DNA, 345 bp, Canis familiaris; identical to SEQ ID NO: 9200

SEQ ID NO: 219308 - DNA, 493 bp, Canis familiaris; identical to SEQ ID NO: 9201

SEQ ID NO: 219309 - DNA, 694 bp, Canis familiaris; identical to SEQ ID NO: 9202
  misc_feature (370)..(370): n is a, c, g, or t
  misc_feature (379)..(380): n is a, c, g, or t

SEQ ID NO: 219310 - DNA, 632 bp, Canis familiaris; identical to SEQ ID NO: 9203

SEQ ID NO: 219311 - DNA, 658 bp, Canis familiaris; identical to SEQ ID NO: 9204

SEQ ID NO: 219312 - DNA, 623 bp, Canis familiaris; identical to SEQ ID NO: 9205

SEQ ID NO: 219313 - DNA, 620 bp, Canis familiaris; identical to SEQ ID NO: 9206
  misc_feature (252)..(252): n is a, c, g, or t

SEQ ID NO: 219314 - DNA, 656 bp, Canis familiaris; identical to SEQ ID NO: 9207

SEQ ID NO: 219315 - DNA, 593 bp, Canis familiaris; identical to SEQ ID NO: 9208

SEQ ID NO: 219316 - DNA, 614 bp, Canis familiaris; identical to SEQ ID NO: 9209

SEQ ID NO: 219317 - DNA, 637 bp, Canis familiaris; identical to SEQ ID NO: 9210

SEQ ID NO: 219318 - DNA, 655 bp, Canis familiaris; identical to SEQ ID NO: 9211

SEQ ID NO: 219319 - DNA, 667 bp, Canis familiaris; identical to SEQ ID NO: 9212
  misc_feature (65)..(65): n is a, c, g, or t
  misc_feature (137)..(137): n is a, c, g, or t
  misc_feature (153)..(153): n is a, c, g, or t
  misc_feature (181)..(181): n is a, c, g, or t

SEQ ID NO: 219320 - DNA, 642 bp, Canis familiaris; identical to SEQ ID NO: 9213

SEQ ID NO: 219321 - DNA, 648 bp, Canis familiaris; identical to SEQ ID NO: 9214

SEQ ID NO: 219322 - DNA, 186 bp, Canis familiaris; identical to SEQ ID NO: 9215

SEQ ID NO: 219323 - DNA, 564 bp, Canis familiaris; identical to SEQ ID NO: 9216

SEQ ID NO: 219324 - DNA, 116 bp, Canis familiaris; identical to SEQ ID NO: 9217

SEQ ID NO: 219325 - DNA, 615 bp, Canis familiaris; identical to SEQ ID NO: 9218

SEQ ID NO: 219326 - DNA, 700 bp, Canis familiaris; identical to SEQ ID NO: 9219

SEQ ID NO: 219327 - DNA, 617 bp, Canis familiaris; identical to SEQ ID NO: 9220

SEQ ID NO: 219328 - DNA, 639 bp, Canis familiaris; identical to SEQ ID NO: 9221

SEQ ID NO: 219329 - DNA, 658 bp, Canis familiaris; identical to SEQ ID NO: 9222

SEQ ID NO: 219330 - DNA, 636 bp, Canis familiaris; identical to SEQ ID NO: 9223

SEQ ID NO: 219331 - DNA, 605 bp, Canis familiaris; identical to SEQ ID NO: 9224

SEQ ID NO: 219332 - DNA, 606 bp, Canis familiaris; identical to SEQ ID NO: 9225
  misc_feature (522)..(522): n is a, c, g, or t

SEQ ID NO: 219333 - DNA, 465 bp, Canis familiaris; identical to SEQ ID NO: 9226

SEQ ID NO: 219334 - DNA, 591 bp, Canis familiaris; identical to SEQ ID NO: 9227

SEQ ID NO: 219335 - DNA, 143 bp, Canis familiaris; identical to SEQ ID NO: 9228

SEQ ID NO: 219336 - DNA, 661 bp, Canis familiaris; identical to SEQ ID NO: 9229

SEQ ID NO: 219337 - DNA, 227 bp, Canis familiaris; identical to SEQ ID NO: 9230

SEQ ID NO: 219338 - DNA, 628 bp, Canis familiaris; identical to SEQ ID NO: 9231

SEQ ID NO: 219339 - DNA, 578 bp, Canis familiaris; identical to SEQ ID NO: 9232

SEQ ID NO: 219340 - DNA, 599 bp, Canis familiaris; identical to SEQ ID NO: 9233

SEQ ID NO: 219341 - DNA, 544 bp, Canis familiaris; identical to SEQ ID NO: 9234

SEQ ID NO: 219342 - DNA, 658 bp, Canis familiaris; identical to SEQ ID NO: 9235
  misc_feature (115)..(115): n is a, c, g, or t

SEQ ID NO: 219343 - DNA, 581 bp, Canis familiaris; identical to SEQ ID NO: 9236

SEQ ID NO: 219344 - DNA, 631 bp, Canis familiaris; identical to SEQ ID NO: 9237

SEQ ID NO: 219345 - DNA, 611 bp, Canis familiaris; identical to SEQ ID NO: 9238

SEQ ID NO: 219346 - DNA, 491 bp, Canis familiaris; identical to SEQ ID NO: 9239

SEQ ID NO: 219347 - DNA, 628 bp, Canis familiaris; identical to SEQ ID NO: 9240
  misc_feature (301)..(301): n is a, c, g, or t

SEQ ID NO: 219348 - DNA, 617 bp, Canis familiaris; identical to SEQ ID NO: 9241

SEQ ID NO: 219349 - DNA, 454 bp, Canis familiaris; identical to SEQ ID NO: 9242

SEQ ID NO: 219350 - DNA, 591 bp, Canis familiaris; identical to SEQ ID NO: 9243

SEQ ID NO: 219351 - DNA, 247 bp, Canis familiaris; identical to SEQ ID NO: 9244

SEQ ID NO: 219352 - DNA, 617 bp, Canis familiaris; identical to SEQ ID NO: 9245

SEQ ID NO: 219353 - DNA, 280 bp, Canis familiaris; identical to SEQ ID NO: 9246

SEQ ID NO: 219354 - DNA, 649 bp, Canis familiaris; identical to SEQ ID NO: 9247

SEQ ID NO: 219355 - DNA, 568 bp, Canis familiaris; identical to SEQ ID NO: 9248
  misc_feature (311)..(311): n is a, c, g, or t

SEQ ID NO: 219356 - DNA, 675 bp, Canis familiaris; identical to SEQ ID NO: 9249
  misc_feature (84)..(84): n is a, c, g, or t

SEQ ID NO: 219357 - DNA, 547 bp, Canis familiaris; identical to SEQ ID NO: 9250
  misc_feature (235)..(235): n is a, c, g, or t

SEQ ID NO: 219358 - DNA, 202 bp, Canis familiaris; identical to SEQ ID NO: 9251

SEQ ID NO: 219359 - DNA, 603 bp, Canis familiaris; identical to SEQ ID NO: 9252

SEQ ID NO: 219360 - DNA, 580 bp, Canis familiaris; identical to SEQ ID NO: 9253

SEQ ID NO: 219361 - DNA, 631 bp, Canis familiaris; identical to SEQ ID NO: 9254

SEQ ID NO: 219362 - DNA, 576 bp, Canis familiaris; identical to SEQ ID NO: 9255

SEQ ID NO: 219363 - DNA, 447 bp, Canis familiaris; identical to SEQ ID NO: 9256

SEQ ID NO: 219364 - DNA, 597 bp, Canis familiaris; identical to SEQ ID NO: 9257

SEQ ID NO: 219365 - DNA, 712 bp, Canis familiaris; identical to SEQ ID NO: 9258

SEQ ID NO: 219366 - DNA, 640 bp, Canis familiaris; identical to SEQ ID NO: 9259

SEQ ID NO: 219367 - DNA, 618 bp, Canis familiaris; identical to SEQ ID NO: 9260
  misc_feature (459)..(459): n is a, c, g, or t
  misc_feature (487)..(487): n is a, c, g, or t

SEQ ID NO: 219368 - DNA, 685 bp, Canis familiaris; identical to SEQ ID NO: 9261

SEQ ID NO: 219369 - DNA, 390 bp, Canis familiaris; identical to SEQ ID NO: 9262

SEQ ID NO: 219370 - DNA, 589 bp, Canis familiaris; identical to SEQ ID NO: 9263
  misc_feature (340)..(341): n is a, c, g, or t

SEQ ID NO: 219371 - DNA, 529 bp, Canis familiaris; identical to SEQ ID NO: 9264
  misc_feature (355)..(355): n is a, c, g, or t

SEQ ID NO: 219372 - DNA, 557 bp, Canis familiaris; identical to SEQ ID NO: 9265

SEQ ID NO: 219373 - DNA, 453 bp, Canis familiaris; identical to SEQ ID NO: 9266

SEQ ID NO: 219374 - DNA, 568 bp, Canis familiaris; identical to SEQ ID NO: 9267

SEQ ID NO: 219375 - DNA, 459 bp, Canis familiaris; identical to SEQ ID NO: 9268

SEQ ID NO: 219376 - DNA, 673 bp, Canis familiaris; identical to SEQ ID NO: 9269

SEQ ID NO: 219377 - DNA, 503 bp, Canis familiaris; identical to SEQ ID NO: 9270

SEQ ID NO: 219378 - DNA, 136 bp, Canis familiaris; identical to SEQ ID NO: 9271

SEQ ID NO: 219379 - DNA, 631 bp, Canis familiaris; identical to SEQ ID NO: 9272

SEQ ID NO: 219380 - DNA, 655 bp, Canis familiaris; identical to SEQ ID NO: 9273

SEQ ID NO: 219381 - DNA, 381 bp, Canis familiaris; identical to SEQ ID NO: 9274

SEQ ID NO: 219382 - DNA, 465 bp, Canis familiaris; identical to SEQ ID NO: 9275
  misc_feature (20)..(21): n is a, c, g, or t

SEQ ID NO: 219383 - DNA, 639 bp, Canis familiaris; identical to SEQ ID NO: 9276

SEQ ID NO: 219384 - DNA, 650 bp, Canis familiaris; identical to SEQ ID NO: 9277
  misc_feature (164)..(164): n is a, c, g, or t

SEQ ID NO: 219385 - DNA, 320 bp, Canis familiaris; identical to SEQ ID NO: 9278

SEQ ID NO: 219386 - DNA, 592 bp, Canis familiaris; identical to SEQ ID NO: 9279
  misc_feature (152)..(152): n is a, c, g, or t

SEQ ID NO: 219387 - DNA, 646 bp, Canis familiaris; identical to SEQ ID NO: 9280

SEQ ID NO: 219388 - DNA, 640 bp, Canis familiaris; identical to SEQ ID NO: 9281

SEQ ID NO: 219389 - DNA, 650 bp, Canis familiaris; identical to SEQ ID NO: 9282

SEQ ID NO: 219390 - DNA, 433 bp, Canis familiaris; identical to SEQ ID NO: 9283

SEQ ID NO: 219391 - DNA, 584 bp, Canis familiaris; identical to SEQ ID NO: 9284

SEQ ID NO: 219392 - DNA, 619 bp, Canis familiaris; identical to SEQ ID NO: 9285
  misc_feature (225)..(225): n is a, c, g, or t

SEQ ID NO: 219393 - DNA, 365 bp, Canis familiaris; identical to SEQ ID NO: 9286

SEQ ID NO: 219394 - DNA, 527 bp, Canis familiaris; identical to SEQ ID NO: 9287

SEQ ID NO: 219395 - DNA, 540 bp, Canis familiaris; identical to SEQ ID NO: 9288

SEQ ID NO: 219396 - DNA, 637 bp, Canis familiaris; identical to SEQ ID NO: 9289

SEQ ID NO: 219397 - DNA, 496 bp, Canis familiaris; identical to SEQ ID NO: 9290

SEQ ID NO: 219398 - DNA, 500 bp, Canis familiaris; identical to SEQ ID NO: 9291

SEQ ID NO: 219399 - DNA, 682 bp, Canis familiaris; identical to SEQ ID NO: 9292
  misc_feature (183)..(183): n is a, c, g, or t

SEQ ID NO: 219400 - DNA, 367 bp, Canis familiaris; identical to SEQ ID NO: 9293

SEQ ID NO: 219401 - DNA, 602 bp, Canis familiaris; identical to SEQ ID NO: 9294
  misc_feature (525)..(525): n is a, c, g, or t
  misc_feature (545)..(545): n is a, c, g, or t

SEQ ID NO: 219402 - DNA, 472 bp, Canis familiaris; identical to SEQ ID NO: 9295

SEQ ID NO: 219403 - DNA, 576 bp, Canis familiaris; identical to SEQ ID NO: 9296

SEQ ID NO: 219404 - DNA, 665 bp, Canis familiaris; identical to SEQ ID NO: 9297

SEQ ID NO: 219405 - DNA, 646 bp, Canis familiaris; identical to SEQ ID NO: 9298

SEQ ID NO: 219406 - DNA, 665 bp, Canis familiaris; identical to SEQ ID NO: 9299
  misc_feature (233)..(233): n is a, c, g, or t
  misc_feature (310)..(310): n is a, c, g, or t

SEQ ID NO: 219407 - DNA, 491 bp, Canis familiaris; identical to SEQ ID NO: 9300

SEQ ID NO: 219408 - DNA, 644 bp, Canis familiaris; identical to SEQ ID NO: 9301

SEQ ID NO: 219409 - DNA, 653 bp, Canis familiaris; identical to SEQ ID NO: 9302

SEQ ID NO: 219410 - DNA, 646 bp, Canis familiaris; identical to SEQ ID NO: 9303

SEQ ID NO: 219411 - DNA, 215 bp, Canis familiaris; identical to SEQ ID NO: 9304

SEQ ID NO: 219412 - DNA, 677 bp, Canis familiaris; identical to SEQ ID NO: 9305
  misc_feature (401)..(401): n is a, c, g, or t

SEQ ID NO: 219413 - DNA, 637 bp, Canis familiaris; identical to SEQ ID NO: 9306

SEQ ID NO: 219414 - DNA, 670 bp, Canis familiaris; identical to SEQ ID NO: 9307
  misc_feature (175)..(176): n is a, c, g, or t

SEQ ID NO: 219415 - DNA, 661 bp, Canis familiaris; identical to SEQ ID NO: 9308

SEQ ID NO: 219416 - DNA, 622 bp, Canis familiaris; identical to SEQ ID NO: 9309

SEQ ID NO: 219417 - DNA, 613 bp, Canis familiaris; identical to SEQ ID NO: 9310
  misc_feature (1)..(1): n is a, c, g, or t
  misc_feature (17)..(17): n is a, c, g, or t

SEQ ID NO: 219418 - DNA, 648 bp, Canis familiaris; identical to SEQ ID NO: 9311

SEQ ID NO: 219419 - DNA, 570 bp, Canis familiaris; identical to SEQ ID NO: 9312

SEQ ID NO: 219420 - DNA, 654 bp, Canis familiaris; identical to SEQ ID NO: 9313

SEQ ID NO: 219421 - DNA, 643 bp, Canis familiaris; identical to SEQ ID NO: 9314

SEQ ID NO: 219422 - DNA, 551 bp, Canis familiaris; identical to SEQ ID NO: 9315

SEQ ID NO: 219423 - DNA, 540 bp, Canis familiaris; identical to SEQ ID NO: 9316

SEQ ID NO: 219424 - DNA, 697 bp, Canis familiaris; identical to SEQ ID NO: 9317

SEQ ID NO: 219425 - DNA, 686 bp, Canis familiaris; identical to SEQ ID NO: 9318
  misc_feature (1)..(1): n is a, c, g, or t

SEQ ID NO: 219426 - DNA, 514 bp, Canis familiaris; identical to SEQ ID NO: 9319
  misc_feature (1)..(1): n is a, c, g, or t

SEQ ID NO: 219427 - DNA, 616 bp, Canis familiaris; identical to SEQ ID NO: 9320

SEQ ID NO: 219428 - DNA, 121 bp, Canis familiaris; identical to SEQ ID NO: 9321

SEQ ID NO: 219429 - DNA, 549 bp, Canis familiaris; identical to SEQ ID NO: 9322

SEQ ID NO: 219430 - DNA, 625 bp, Canis familiaris; identical to SEQ ID NO: 9323
  misc_feature (1)..(1): n is a, c, g, or t

SEQ ID NO: 219431 - DNA, 546 bp, Canis familiaris; identical to SEQ ID NO: 9324

SEQ ID NO: 219432 - DNA, 363 bp, Canis familiaris; identical to SEQ ID NO: 9325

SEQ ID NO: 219433 - DNA, 594 bp, Canis familiaris; identical to SEQ ID NO: 9326
  misc_feature (219)..(219): n is a, c, g, or t

SEQ ID NO: 219434 - DNA, 585 bp, Canis familiaris; identical to SEQ ID NO: 9327

SEQ ID NO: 219435 - DNA, 603 bp, Canis familiaris; identical to SEQ ID NO: 9328

SEQ ID NO: 219436 - DNA, 568 bp, Canis familiaris; identical to SEQ ID NO: 9329

SEQ ID NO: 219437 - DNA, 590 bp, Canis familiaris; identical to SEQ ID NO: 9330

SEQ ID NO: 219438 - DNA, 653 bp, Canis familiaris; identical to SEQ ID NO: 9331

SEQ ID NO: 219439 - DNA, 603 bp, Canis familiaris; identical to SEQ ID NO: 9332

SEQ ID NO: 219440 - DNA, 648 bp, Canis familiaris; identical to SEQ ID NO: 9333
  misc_feature (533)..(533): n is a, c, g, or t

SEQ ID NO: 219441 - DNA, 568 bp, Canis familiaris; identical to SEQ ID NO: 9334

SEQ ID NO: 219442 - DNA, 572 bp, Canis familiaris; identical to SEQ ID NO: 9335

SEQ ID NO: 219443 - DNA, 586 bp, Canis familiaris; identical to SEQ ID NO: 9336

SEQ ID NO: 219444 - DNA, 603 bp, Canis familiaris; identical to SEQ ID NO: 9337

SEQ ID NO: 219445 - DNA, 590 bp, Canis familiaris; identical to SEQ ID NO: 9338

SEQ ID NO: 219446 - DNA, 608 bp, Canis familiaris; identical to SEQ ID NO: 9339

SEQ ID NO: 219447 - DNA, 543 bp, Canis familiaris; identical to SEQ ID NO: 9340

SEQ ID NO: 219448 - DNA, 603 bp, Canis familiaris; identical to SEQ ID NO: 9341

SEQ ID NO: 219449 - DNA, 566 bp, Canis familiaris; identical to SEQ ID NO: 9342

SEQ ID NO: 219450 - DNA, 599 bp, Canis familiaris; identical to SEQ ID NO: 9343

SEQ ID NO: 219451 - DNA, 559 bp, Canis familiaris; identical to SEQ ID NO: 9344

SEQ ID NO: 219452 - DNA, 554 bp, Canis familiaris; identical to SEQ ID NO: 9345

SEQ ID NO: 219453 - DNA, 674 bp, Canis familiaris; identical to SEQ ID NO: 9346

SEQ ID NO: 219454 - DNA, 470 bp, Canis familiaris; identical to SEQ ID NO: 9347

SEQ ID NO: 219455 - DNA, 560 bp, Canis familiaris; identical to SEQ ID NO: 9348

SEQ ID NO: 219456 - DNA, 576 bp, Canis familiaris; identical to SEQ ID NO: 9349

SEQ ID NO: 219457 - DNA, 640 bp, Canis familiaris; identical to SEQ ID NO: 9350

SEQ ID NO: 219458 - DNA, 655 bp, Canis familiaris; identical to SEQ ID NO: 9351

SEQ ID NO: 219459 - DNA, 523 bp, Canis familiaris; identical to SEQ ID NO: 9352

SEQ ID NO: 219460 - DNA, 564 bp, Canis familiaris; identical to SEQ ID NO: 9353

SEQ ID NO: 219461 - DNA, 659 bp, Canis familiaris; identical to SEQ ID NO: 9354

SEQ ID NO: 219462 - DNA, 604 bp, Canis familiaris; identical to SEQ ID NO: 9355

SEQ ID NO: 219463 - DNA, 645 bp, Canis familiaris; identical to SEQ ID NO: 9356

SEQ ID NO: 219464 - DNA, 608 bp, Canis familiaris; identical to SEQ ID NO: 9357

SEQ ID NO: 219465 - DNA, 612 bp, Canis familiaris; identical to SEQ ID NO: 9358

SEQ ID NO: 219466 - DNA, 642 bp, Canis familiaris; identical to SEQ ID NO: 9359

SEQ ID NO: 219467 - DNA, 117 bp, Canis familiaris; identical to SEQ ID NO: 9360

SEQ ID NO: 219468 - DNA, 600 bp, Canis familiaris; identical to SEQ ID NO: 9361

SEQ ID NO: 219469 - DNA, 688 bp, Canis familiaris; identical to SEQ ID NO: 9362

SEQ ID NO: 219470 - DNA, 562 bp, Canis familiaris; identical to SEQ ID NO: 9363

SEQ ID NO: 219471 - DNA, 590 bp, Canis familiaris; identical to SEQ ID NO: 9364

SEQ ID NO: 219472 - DNA, 507 bp, Canis familiaris; identical to SEQ ID NO: 9365

SEQ ID NO: 219473 - DNA, 607 bp, Canis familiaris; identical to SEQ ID NO: 9366

SEQ ID NO: 219474 - DNA, 501 bp, Canis familiaris; identical to SEQ ID NO: 9367

SEQ ID NO: 219475 - DNA, 672 bp, Canis familiaris; identical to SEQ ID NO: 9368
  misc_feature (266)..(266): n is a, c, g, or t

SEQ ID NO: 219476 - DNA, 555 bp, Canis familiaris; identical to SEQ ID NO: 9369

SEQ ID NO: 219477 - DNA, 352 bp, Canis familiaris; identical to SEQ ID NO: 9370

SEQ ID NO: 219478 - DNA, 573 bp, Canis familiaris; identical to SEQ ID NO: 9371

SEQ ID NO: 219479 - DNA, 587 bp, Canis familiaris; identical to SEQ ID NO: 9372
  misc_feature (402)..(402): n is a, c, g, or t

SEQ ID NO: 219480 - DNA, 461 bp, Canis familiaris; identical to SEQ ID NO: 9373
  misc_feature (1)..(1): n is a, c, g, or t

SEQ ID NO: 219481 - DNA, 429 bp, Canis familiaris; identical to SEQ ID NO: 9374

SEQ ID NO: 219482 - DNA, 545 bp, Canis familiaris; identical to SEQ ID NO: 9375

SEQ ID NO: 219483 - DNA, 568 bp, Canis familiaris; identical to SEQ ID NO: 9376

SEQ ID NO: 219484 - DNA, 525 bp, Canis familiaris; identical to SEQ ID NO: 9377

SEQ ID NO: 219485 - DNA, 478 bp, Canis familiaris; identical to SEQ ID NO: 9378

SEQ ID NO: 219486 - DNA, 604 bp, Canis familiaris; identical to SEQ ID NO: 9379

SEQ ID NO: 219487 - DNA, 471 bp, Canis familiaris; identical to SEQ ID NO: 9380

SEQ ID NO: 219488 - DNA, 294 bp, Canis familiaris; identical to SEQ ID NO: 9381

SEQ ID NO: 219489 - DNA, 546 bp, Canis familiaris; identical to SEQ ID NO: 9382

SEQ ID NO: 219490 - DNA, 569 bp, Canis familiaris; identical to SEQ ID NO: 9383

SEQ ID NO: 219491 - DNA, 325 bp, Canis familiaris; identical to SEQ ID NO: 9384

SEQ ID NO: 219492 - DNA, 613 bp, Canis familiaris; identical to SEQ ID NO: 9385

SEQ ID NO: 219493 - DNA, 644 bp, Canis familiaris; identical to SEQ ID NO: 9386

SEQ ID NO: 219494 - DNA, 619 bp, Canis familiaris; identical to SEQ ID NO: 9387
  misc_feature (61)..(61): n is a, c, g, or t

SEQ ID NO: 219495 - DNA, 622 bp, Canis familiaris; identical to SEQ ID NO: 9388

SEQ ID NO: 219496 - DNA, 650 bp, Canis familiaris; identical to SEQ ID NO: 9389

SEQ ID NO: 219497 - DNA, 535 bp, Canis familiaris; identical to SEQ ID NO: 9390

SEQ ID NO: 219498 - DNA, 329 bp, Canis familiaris; identical to SEQ ID NO: 9391

SEQ ID NO: 219499 - DNA, 626 bp, Canis familiaris; identical to SEQ ID NO: 9392

SEQ ID NO: 219500 - DNA, 601 bp, Canis familiaris; identical to SEQ ID NO: 9393

SEQ ID NO: 219501 - DNA, 673 bp, Canis familiaris; identical to SEQ ID NO: 9394

SEQ ID NO: 219502 - DNA, 703 bp, Canis familiaris; identical to SEQ ID NO: 9395

SEQ ID NO: 219503 - DNA, 655 bp, Canis familiaris; identical to SEQ ID NO: 9396
  misc_feature (16)..(16): n is a, c, g, or t
  misc_feature (35)..(35): n is a, c, g, or t

SEQ ID NO: 219504 - DNA, 567 bp, Canis familiaris; identical to SEQ ID NO: 9397

SEQ ID NO: 219505 - DNA, 659 bp, Canis familiaris; identical to SEQ ID NO: 9398

SEQ ID NO: 219506 - DNA, 638 bp, Canis familiaris; identical to SEQ ID NO: 9399

SEQ ID NO: 219507 - DNA, 678 bp, Canis familiaris; identical to SEQ ID NO: 9400
  misc_feature (74)..(74): n is a, c, g, or t

SEQ ID NO: 219508 - DNA, 585 bp, Canis familiaris; identical to SEQ ID NO: 9401
  misc_feature (30)..(30): n is a, c, g, or t

SEQ ID NO: 219509 - DNA, 545 bp, Canis familiaris; identical to SEQ ID NO: 9402
  misc_feature (541)..(541): n is a, c, g, or t

SEQ ID NO: 219510 - DNA, 540 bp, Canis familiaris; identical to SEQ ID NO: 9403

SEQ ID NO: 219511 - DNA, 717 bp, Canis familiaris; identical to SEQ ID NO: 9404

SEQ ID NO: 219512 - DNA, 667 bp, Canis familiaris; identical to SEQ ID NO: 9405

SEQ ID NO: 219513 - DNA, 619 bp, Canis familiaris; identical to SEQ ID NO: 9406

SEQ ID NO: 219514 - DNA, 646 bp, Canis familiaris; identical to SEQ ID NO: 9407
  misc_feature (1)..(1): n is a, c, g, or t

SEQ ID NO: 219515 - DNA, 448 bp, Canis familiaris; identical to SEQ ID NO: 9408

SEQ ID NO: 219516 - DNA, 648 bp, Canis familiaris; identical to SEQ ID NO: 9409

SEQ ID NO: 219517 - DNA, 585 bp, Canis familiaris; identical to SEQ ID NO: 9410
  misc_feature (1)..(1): n is a, c, g, or t

SEQ ID NO: 219518 - DNA, 582 bp, Canis familiaris; identical to SEQ ID NO: 9411
  misc_feature (1)..(1): n is a, c, g, or t
  misc_feature (33)..(33): n is a, c, g, or t

SEQ ID NO: 219519 - DNA, 600 bp, Canis familiaris; identical to SEQ ID NO: 9412

SEQ ID NO: 219520 - DNA, 541 bp, Canis familiaris; identical to SEQ ID NO: 9413

SEQ ID NO: 219521 - DNA, 589 bp, Canis familiaris; identical to SEQ ID NO: 9414

SEQ ID NO: 219522 - DNA, 614 bp, Canis familiaris; identical to SEQ ID NO: 9415

SEQ ID NO: 219523 - DNA, 588 bp, Canis familiaris; identical to SEQ ID NO: 9416

SEQ ID NO: 219524 - DNA, 544 bp, Canis familiaris; identical to SEQ ID NO: 9417
  misc_feature (81)..(81): n is a, c, g, or t

SEQ ID NO: 219525 - DNA, 596 bp, Canis familiaris; identical to SEQ ID NO: 9418

SEQ ID NO: 219526 - DNA, 622 bp, Canis familiaris; identical to SEQ ID NO: 9419

SEQ ID NO: 219527 - DNA, 654 bp, Canis familiaris; identical to SEQ ID NO: 9420

SEQ ID NO: 219528 - DNA, 491 bp, Canis familiaris; identical to SEQ ID NO: 9421

SEQ ID NO: 219529 - DNA, 743 bp, Canis familiaris; identical to SEQ ID NO: 9422

SEQ ID NO: 219530 - DNA, 602 bp, Canis familiaris; identical to SEQ ID NO: 9423

SEQ ID NO: 219531 - DNA, 562 bp, Canis familiaris; identical to SEQ ID NO: 9424

SEQ ID NO: 219532 - DNA, 573 bp, Canis familiaris; identical to SEQ ID NO: 9425

SEQ ID NO: 219533 - DNA, 628 bp, Canis familiaris; identical to SEQ ID NO: 9426
  misc_feature (1)..(1): n is a, c, g, or t

SEQ ID NO: 219534 - DNA, 626 bp, Canis familiaris; identical to SEQ ID NO: 9427

SEQ ID NO: 219535 - DNA, 624 bp, Canis familiaris; identical to SEQ ID NO: 9428

SEQ ID NO: 219536 - DNA, 578 bp, Canis familiaris; identical to SEQ ID NO: 9429

SEQ ID NO: 219537 - DNA, 171 bp, Canis familiaris; identical to SEQ ID NO: 9430

SEQ ID NO: 219538 - DNA, 563 bp, Canis familiaris; identical to SEQ ID NO: 9431

SEQ ID NO: 219539 - DNA, 653 bp, Canis familiaris; identical to SEQ ID NO: 9432

SEQ ID NO: 219540 - DNA, 624 bp, Canis familiaris; identical to SEQ ID NO: 9433
  misc_feature (32)..(32): n is a, c, g, or t

SEQ ID NO: 219541 - DNA, 625 bp, Canis familiaris; identical to SEQ ID NO: 9434
  misc_feature (41)..(41): n is a, c, g, or t
  misc_feature (78)..(78): n is a, c, g, or t
  misc_feature (142)..(143): n is a, c, g, or t

SEQ ID NO: 219542 - DNA, 685 bp, Canis familiaris; identical to SEQ ID NO: 9435

SEQ ID NO: 219543 - DNA, 501 bp, Canis familiaris; identical to SEQ ID NO: 9436

SEQ ID NO: 219544 - DNA, 605 bp, Canis familiaris; identical to SEQ ID NO: 9437

SEQ ID NO: 219545 - DNA, 590 bp, Canis familiaris; identical to SEQ ID NO: 9438

SEQ ID NO: 219546 - DNA, 553 bp, Canis familiaris; identical to SEQ ID NO: 9439
  misc_feature (1)..(1): n is a, c, g, or t
  misc_feature (33)..(33): n is a, c, g, or t

SEQ ID NO: 219547 - DNA, 649 bp, Canis familiaris; identical to SEQ ID NO: 9440

SEQ ID NO: 219548 - DNA, 607 bp, Canis familiaris; identical to SEQ ID NO: 9441

SEQ ID NO: 219549 - DNA, 611 bp, Canis familiaris; identical to SEQ ID NO: 9442

SEQ ID NO: 219550 - DNA, 127 bp, Canis familiaris; identical to SEQ ID NO: 9443
  misc_feature (1)..(1): n is a, c, g, or t

SEQ ID NO: 219551 - DNA, 650 bp, Canis familiaris; identical to SEQ ID NO: 9444

SEQ ID NO: 219552 - DNA, 671 bp, Canis familiaris; identical to SEQ ID NO: 9445

SEQ ID NO: 219553 - DNA, 798 bp, Canis familiaris; identical to SEQ ID NO: 9446

SEQ ID NO: 219554 - DNA, 691 bp, Canis familiaris; identical to SEQ ID NO: 9447
  misc_feature (360)..(360): n is a, c, g, or t

SEQ ID NO: 219555 - DNA, 522 bp, Canis familiaris; identical to SEQ ID NO: 9448

SEQ ID NO: 219556 - DNA, 532 bp, Canis familiaris; identical to SEQ ID NO: 9449

SEQ ID NO: 219557 - DNA, 520 bp, Canis familiaris; identical to SEQ ID NO: 9450
  misc_feature (1)..(1): n is a, c, g, or t

SEQ ID NO: 219558 - DNA, 547 bp, Canis familiaris; identical to SEQ ID NO: 9451

SEQ ID NO: 219559 - DNA, 131 bp, Canis familiaris; identical to SEQ ID NO: 9452

SEQ ID NO: 219560 - DNA, 473 bp, Canis familiaris; identical to SEQ ID NO: 9453

SEQ ID NO: 219561 - DNA, 589 bp, Canis familiaris; identical to SEQ ID NO: 9454

SEQ ID NO: 219562 - DNA, 560 bp, Canis familiaris; identical to SEQ ID NO: 9455

SEQ ID NO: 219563 - DNA, 496 bp, Canis familiaris; identical to SEQ ID NO: 9456

SEQ ID NO: 219564 - DNA, 439 bp, Canis familiaris; identical to SEQ ID NO: 9457

SEQ ID NO: 219565 - DNA, 524 bp, Canis familiaris; identical to SEQ ID NO: 9458
  misc_feature (1)..(1): n is a, c, g, or t

SEQ ID NO: 219566 - DNA, 496 bp, Canis familiaris; identical to SEQ ID NO: 9459
  misc_feature (1)..(1): n is a, c, g, or t

SEQ ID NO: 219567 - DNA, 549 bp, Canis familiaris; identical to SEQ ID NO: 9460

SEQ ID NO: 219568 - DNA, 540 bp, Canis familiaris; identical to SEQ ID NO: 9461

SEQ ID NO: 219569 - DNA, 588 bp, Canis familiaris; identical to SEQ ID NO: 9462

SEQ ID NO: 219570 - DNA, 465 bp, Canis familiaris; identical to SEQ ID NO: 9463

SEQ ID NO: 219571 - DNA, 604 bp, Canis familiaris; identical to SEQ ID NO: 9464

SEQ ID NO: 219572 - DNA, 604 bp, Canis familiaris; identical to SEQ ID NO: 9465

SEQ ID NO: 219573 - DNA, 523 bp, Canis familiaris; identical to SEQ ID NO: 9466

SEQ ID NO: 219574 - DNA, 571 bp, Canis familiaris; identical to SEQ ID NO: 9467

SEQ ID NO: 219575 - DNA, 502 bp, Canis familiaris; identical to SEQ ID NO: 9468

SEQ ID NO: 219576 - DNA, 588 bp, Canis familiaris; identical to SEQ ID NO: 9469

SEQ ID NO: 219577 - DNA, 539 bp, Canis familiaris; identical to SEQ ID NO: 9470
  misc_feature (59)..(59): n is a, c, g, or t
  misc_feature (88)..(89): n is a, c, g, or t
  misc_feature (100)..(100): n is a, c, g, or t
  misc_feature (147)..(148): n is a, c, g, or t
  misc_feature (156)..(158): n is a, c, g, or t
  misc_feature (169)..(169): n is a, c, g, or t
  misc_feature (179)..(179): n is a, c, g, or t

SEQ ID NO: 219578 - DNA, 351 bp, Canis familiaris; identical to SEQ ID NO: 9471

SEQ ID NO: 219579 - DNA, 686 bp, Canis familiaris; identical to SEQ ID NO: 9472

SEQ ID NO: 219580 - DNA, 570 bp, Canis familiaris; identical to SEQ ID NO: 9473

SEQ ID NO: 219581 - DNA, 594 bp, Canis familiaris; identical to SEQ ID NO: 9474

SEQ ID NO: 219582 - DNA, 661 bp, Canis familiaris; identical to SEQ ID NO: 9475

SEQ ID NO: 219583 - DNA, 299 bp, Canis familiaris; identical to SEQ ID NO: 9476

SEQ ID NO: 219584 - DNA, 566 bp, Canis familiaris; identical to SEQ ID NO: 9477
  misc_feature (119)..(120): n is a, c, g, or t
  misc_feature (137)..(138): n is a, c, g, or t
  misc_feature (170)..(170): n is a, c, g, or t
  misc_feature (546)..(546): n is a, c, g, or t

SEQ ID NO: 219585 - DNA, 622 bp, Canis familiaris; identical to SEQ ID NO: 9478

SEQ ID NO: 219586 - DNA, 582 bp, Canis familiaris; identical to SEQ ID NO: 9479

SEQ ID NO: 219587 - DNA, 616 bp, Canis familiaris; identical to SEQ ID NO: 9480
  misc_feature (153)..(153): n is a, c, g, or t

SEQ ID NO: 219588 - DNA, 626 bp, Canis familiaris; identical to SEQ ID NO: 9481

SEQ ID NO: 219589 - DNA, 641 bp, Canis familiaris; identical to SEQ ID NO: 9482

SEQ ID NO: 219590 - DNA, 628 bp, Canis familiaris; identical to SEQ ID NO: 9483

SEQ ID NO: 219591 - DNA, 199 bp, Canis familiaris; identical to SEQ ID NO: 9484

SEQ ID NO: 219592 - DNA, 615 bp, Canis familiaris; identical to SEQ ID NO: 9485

SEQ ID NO: 219593 - DNA, 695 bp, Canis familiaris; identical to SEQ ID NO: 9486

SEQ ID NO: 219594 - DNA, 561 bp, Canis familiaris; identical to SEQ ID NO: 9487

SEQ ID NO: 219595 - DNA, 538 bp, Canis familiaris; identical to SEQ ID NO: 9488
  misc_feature (69)..(69): n is a, c, g, or t

SEQ ID NO: 219596 - DNA, 642 bp, Canis familiaris; identical to SEQ ID NO: 9489

SEQ ID NO: 219597 - DNA, 494 bp, Canis familiaris; identical to SEQ ID NO: 9490
  misc_feature (107)..(107): n is a, c, g, or t
  misc_feature (119)..(119): n is a, c, g, or t
  misc_feature (126)..(126): n is a, c, g, or t
  misc_feature (144)..(144): n is a, c, g, or t

SEQ ID NO: 219598 - DNA, 608 bp, Canis familiaris; identical to SEQ ID NO: 9491

SEQ ID NO: 219599 - DNA, 661 bp, Canis familiaris; identical to SEQ ID NO: 9492

SEQ ID NO: 219600 - DNA, 583 bp, Canis familiaris; identical to SEQ ID NO: 9493
  misc_feature (1)..(1): n is a, c, g, or t
  misc_feature (167)..(167): n is a, c, g, or t

SEQ ID NO: 219601 - DNA, 647 bp, Canis familiaris; identical to SEQ ID NO: 9494

SEQ ID NO: 219602 - DNA, 603 bp, Canis familiaris; identical to SEQ ID NO: 9495

SEQ ID NO: 219603 - DNA, 529 bp, Canis familiaris; identical to SEQ ID NO: 9496

SEQ ID NO: 219604 - DNA, 554 bp, Canis familiaris; identical to SEQ ID NO: 9497

SEQ ID NO: 219605 - DNA, 295 bp, Canis familiaris; identical to SEQ ID NO: 9498

SEQ ID NO: 219606 - DNA, 323 bp, Canis familiaris; identical to SEQ ID NO: 9499

SEQ ID NO: 219607 - DNA, 565 bp, Canis familiaris; identical to SEQ ID NO: 9500

SEQ ID NO: 219608 - DNA, 111 bp, Canis familiaris; identical to SEQ ID NO: 9501

SEQ ID NO: 219609 - DNA, 577 bp, Canis familiaris; identical to SEQ ID NO: 9502

SEQ ID NO: 219610 - DNA, 535 bp, Canis familiaris; identical to SEQ ID NO: 9503

SEQ ID NO: 219611 - DNA, 397 bp, Canis familiaris; identical to SEQ ID NO: 9504

SEQ ID NO: 219612 - DNA, 627 bp, Canis familiaris; identical to SEQ ID NO: 9505

SEQ ID NO: 219613 - DNA, 540 bp, Canis familiaris; identical to SEQ ID NO: 9506

SEQ ID NO: 219614 - DNA, 599 bp, Canis familiaris; identical to SEQ ID NO: 9507
  misc_feature (272)..(273): n is a, c, g, or t

SEQ ID NO: 219615 - DNA, 368 bp, Canis familiaris; identical to SEQ ID NO: 9508

SEQ ID NO: 219616 - DNA, 676 bp, Canis familiaris; identical to SEQ ID NO: 9509

SEQ ID NO: 219617 - DNA, 523 bp, Canis familiaris; identical to SEQ ID NO: 9510

SEQ ID NO: 219618 - DNA, 321 bp, Canis familiaris; identical to SEQ ID NO: 9511

SEQ ID NO: 219619 - DNA, 601 bp, Canis familiaris; identical to SEQ ID NO: 9512

SEQ ID NO: 219620 - DNA, 586 bp, Canis familiaris; identical to SEQ ID NO: 9513

SEQ ID NO: 219621 - DNA, 123 bp, Canis familiaris; identical to SEQ ID NO: 9514

SEQ ID NO: 219622 - DNA, 606 bp, Canis familiaris; identical to SEQ ID NO: 9515

SEQ ID NO: 219623 - DNA, 496 bp, Canis familiaris; identical to SEQ ID NO: 9516

SEQ ID NO: 219624 - DNA, 541 bp, Canis familiaris; identical to SEQ ID NO: 9517

SEQ ID NO: 219625 - DNA, 540 bp, Canis familiaris; identical to SEQ ID NO: 9518

SEQ ID NO: 219626 - DNA, 548 bp, Canis familiaris; identical to SEQ ID NO: 9519

SEQ ID NO: 219627 - DNA, 600 bp, Canis familiaris; identical to SEQ ID NO: 9520

SEQ ID NO: 219628 - DNA, 468 bp, Canis familiaris; identical to SEQ ID NO: 9521

SEQ ID NO: 219629 - DNA, 577 bp, Canis familiaris; identical to SEQ ID NO: 9522

SEQ ID NO: 219630 - DNA, 589 bp, Canis familiaris; identical to SEQ ID NO: 9523

SEQ ID NO: 219631 - DNA, 464 bp, Canis familiaris; identical to SEQ ID NO: 9524

SEQ ID NO: 219632 - DNA, 115 bp, Canis familiaris; identical to SEQ ID NO: 9525

SEQ ID NO: 219633 - DNA, 122 bp, Canis familiaris; identical to SEQ ID NO: 9526

SEQ ID NO: 219634 - DNA, 583 bp, Canis familiaris; identical to SEQ ID NO: 9527

SEQ ID NO: 219635 - DNA, 445 bp, Canis familiaris; identical to SEQ ID NO: 9528
  misc_feature (370)..(371): n is a, c, g, or t

SEQ ID NO: 219636 - DNA, 413 bp, Canis familiaris; identical to SEQ ID NO: 9529

SEQ ID NO: 219637 - DNA, 677 bp, Canis familiaris; identical to SEQ ID NO: 9530
  misc_feature (14)..(14): n is a, c, g, or t

SEQ ID NO: 219638 - DNA, 346 bp, Canis familiaris; identical to SEQ ID NO: 9531

SEQ ID NO: 219639 - DNA, 558 bp, Canis familiaris; identical to SEQ ID NO: 9532

SEQ ID NO: 219640 - DNA, 391 bp, Canis familiaris; identical to SEQ ID NO: 9533

SEQ ID NO: 219641 - DNA, 228 bp, Canis familiaris; identical to SEQ ID NO: 9534

SEQ ID NO: 219642 - DNA, 524 bp, Canis familiaris; identical to SEQ ID NO: 9535

SEQ ID NO: 219643 - DNA, 608 bp, Canis familiaris; identical to SEQ ID NO: 9536

SEQ ID NO: 219644 - DNA, 172 bp, Canis familiaris; identical to SEQ ID NO: 9537

SEQ ID NO: 219645 - DNA, 474 bp, Canis familiaris; identical to SEQ ID NO: 9538

SEQ ID NO: 219646 - DNA, 329 bp, Canis familiaris; identical to SEQ ID NO: 9539

SEQ ID NO: 219647 - DNA, 487 bp, Canis familiaris; identical to SEQ ID NO: 9540

SEQ ID NO: 219648 - DNA, 536 bp, Canis familiaris; identical to SEQ ID NO: 9541

SEQ ID NO: 219649 - DNA, 563 bp, Canis familiaris; identical to SEQ ID NO: 9542

SEQ ID NO: 219650 - DNA, 181 bp, Canis familiaris; identical to SEQ ID NO: 9543

SEQ ID NO: 219651 - DNA, 492 bp, Canis familiaris; identical to SEQ ID NO: 9544

SEQ ID NO: 219652 - DNA, 555 bp, Canis familiaris; identical to SEQ ID NO: 9545

SEQ ID NO: 219653 - DNA, 588 bp, Canis familiaris; identical to SEQ ID NO: 9546

SEQ ID NO: 219654 - DNA, 617 bp, Canis familiaris; identical to SEQ ID NO: 9547

SEQ ID NO: 219655 - DNA, 625 bp, Canis familiaris; identical to SEQ ID NO: 9548

SEQ ID NO: 219656 - DNA, 571 bp, Canis familiaris; identical to SEQ ID NO: 9549

SEQ ID NO: 219657 - DNA, 393 bp, Canis familiaris; identical to SEQ ID NO: 9550
  misc_feature (1)..(1): n is a, c, g, or t

SEQ ID NO: 219658 - DNA, 618 bp, Canis familiaris; identical to SEQ ID NO: 9551

SEQ ID NO: 219659 - DNA, 373 bp, Canis familiaris; identical to SEQ ID NO: 9552

SEQ ID NO: 219660 - DNA, 555 bp, Canis familiaris; identical to SEQ ID NO: 9553

SEQ ID NO: 219661 - DNA, 527 bp, Canis familiaris; identical to SEQ ID NO: 9554

SEQ ID NO: 219662 - DNA, 382 bp, Canis familiaris; identical to SEQ ID NO: 9555

SEQ ID NO: 219663 - DNA, 668 bp, Canis familiaris; identical to SEQ ID NO: 9556
  misc_feature (652)..(652): n is a, c, g, or t

SEQ ID NO: 219664 - DNA, 499 bp, Canis familiaris; identical to SEQ ID NO: 9557
  misc_feature (1)..(1): n is a, c, g, or t

SEQ ID NO: 219665 - DNA, 541 bp, Canis familiaris; identical to SEQ ID NO: 9558

SEQ ID NO: 219666 - DNA, 690 bp, Canis familiaris; identical to SEQ ID NO: 9559

SEQ ID NO: 219667 - DNA, 338 bp, Canis familiaris; identical to SEQ ID NO: 9560

SEQ ID NO: 219668 - DNA, 304 bp, Canis familiaris; identical to SEQ ID NO: 9561

SEQ ID NO: 219669 - DNA, 614 bp, Canis familiaris; identical to SEQ ID NO: 9562

SEQ ID NO: 219670 - DNA, 390 bp, Canis familiaris; identical to SEQ ID NO: 9563

SEQ ID NO: 219671 - DNA, 159 bp, Canis familiaris; identical to SEQ ID NO: 9564

SEQ ID NO: 219672 - DNA, 333 bp, Canis familiaris; identical to SEQ ID NO: 9565

SEQ ID NO: 219673 - DNA, 479 bp, Canis familiaris; identical to SEQ ID NO: 9566

SEQ ID NO: 219674 - DNA, 512 bp, Canis familiaris; identical to SEQ ID NO: 9567

SEQ ID NO: 219675 - DNA, 186 bp, Canis familiaris; identical to SEQ ID NO: 9568
  misc_feature (1)..(1): n is a, c, g, or t

SEQ ID NO: 219676 - DNA, 502 bp, Canis familiaris; identical to SEQ ID NO: 9569

SEQ ID NO: 219677 - DNA, 626 bp, Canis familiaris; identical to SEQ ID NO: 9570

SEQ ID NO: 219678 - DNA, 647 bp, Canis familiaris; identical to SEQ ID NO: 9571

SEQ ID NO: 219679 - DNA, 607 bp, Canis familiaris; identical to SEQ ID NO: 9572

SEQ ID NO: 219680 - DNA, 637 bp, Canis familiaris; identical to SEQ ID NO: 9573

SEQ ID NO: 219681 - DNA, 705 bp, Canis familiaris; identical to SEQ ID NO: 9574

SEQ ID NO: 219682 - DNA, 525 bp, Canis familiaris; identical to SEQ ID NO: 9575

SEQ ID NO: 219683 - DNA, 595 bp, Canis familiaris; identical to SEQ ID NO: 9576

SEQ ID NO: 219684 - DNA, 575 bp, Canis familiaris; identical to SEQ ID NO: 9577

SEQ ID NO: 219685 - DNA, 588 bp, Canis familiaris; identical to SEQ ID NO: 9578

SEQ ID NO: 219686 - DNA, 520 bp, Canis familiaris; identical to SEQ ID NO: 9579
  misc_feature (1)..(1): n is a, c, g, or t

SEQ ID NO: 219687 - DNA, 152 bp, Canis familiaris; identical to SEQ ID NO: 9580

SEQ ID NO: 219688 - DNA, 471 bp, Canis familiaris; identical to SEQ ID NO: 9581

SEQ ID NO: 219689 - DNA, 637 bp, Canis familiaris; identical to SEQ ID NO: 9582
  misc_feature (543)..(543): n is a, c, g, or t

SEQ ID NO: 219690 - DNA, 598 bp, Canis familiaris; identical to SEQ ID NO: 9583

SEQ ID NO: 219691 - DNA, 520 bp, Canis familiaris; identical to SEQ ID NO: 9584

SEQ ID NO: 219692 - DNA, 629 bp, Canis familiaris; identical to SEQ ID NO: 9585

SEQ ID NO: 219693 - DNA, 625 bp, Canis familiaris; identical to SEQ ID NO: 9586

SEQ ID NO: 219694 - DNA, 649 bp, Canis familiaris; identical to SEQ ID NO: 9587

SEQ ID NO: 219695 - DNA, 519 bp, Canis familiaris; identical to SEQ ID NO: 9588

SEQ ID NO: 219696 - DNA, 649 bp, Canis familiaris; identical to SEQ ID NO: 9589

SEQ ID NO: 219697 - DNA, 649 bp, Canis familiaris; identical to SEQ ID NO: 9590

SEQ ID NO: 219698 - DNA, 599 bp, Canis familiaris; identical to SEQ ID NO: 9591

SEQ ID NO: 219699 - DNA, 657 bp, Canis familiaris; identical to SEQ ID NO: 9592

SEQ ID NO: 219700 - DNA, 550 bp, Canis familiaris; identical to SEQ ID NO: 9593

SEQ ID NO: 219701 - DNA, 545 bp, Canis familiaris; identical to SEQ ID NO: 9594

SEQ ID NO: 219702 - DNA, 658 bp, Canis familiaris; identical to SEQ ID NO: 9595
  misc_feature (267)..(267): n is a, c, g, or t

SEQ ID NO: 219703 - DNA, 625 bp, Canis familiaris; identical to SEQ ID NO: 9596

SEQ ID NO: 219704 - DNA, 595 bp, Canis familiaris; identical to SEQ ID NO: 9597

SEQ ID NO: 219705 - DNA, 481 bp, Canis familiaris; identical to SEQ ID NO: 9598

SEQ ID NO: 219706 - DNA, 611 bp, Canis familiaris; identical to SEQ ID NO: 9599

SEQ ID NO: 219707 - DNA, 684 bp, Canis familiaris; identical to SEQ ID NO: 9600

SEQ ID NO: 219708 - DNA, 257 bp, Canis familiaris; identical to SEQ ID NO: 9601

SEQ ID NO: 219709 - DNA, 624 bp, Canis familiaris; identical to SEQ ID NO: 9602

SEQ ID NO: 219710 - DNA, 664 bp, Canis familiaris; identical to SEQ ID NO: 9603

SEQ ID NO: 219711 - DNA, 532 bp, Canis familiaris; identical to SEQ ID NO: 9604

SEQ ID NO: 219712 - DNA, 554 bp, Canis familiaris; identical to SEQ ID NO: 9605

SEQ ID NO: 219713 - DNA, 644 bp, Canis familiaris; identical to SEQ ID NO: 9606

SEQ ID NO: 219714 - DNA, 585 bp, Canis familiaris; identical to SEQ ID NO: 9607

SEQ ID NO: 219715 - DNA, 414 bp, Canis familiaris; identical to SEQ ID NO: 9608

SEQ ID NO: 219716 - DNA, 551 bp, Canis familiaris; identical to SEQ ID NO: 9609

SEQ ID NO: 219717 - DNA, 608 bp, Canis familiaris; identical to SEQ ID NO: 9610

SEQ ID NO: 219718 - DNA, 334 bp, Canis familiaris; identical to SEQ ID NO: 9611

SEQ ID NO: 219719 - DNA, 324 bp, Canis familiaris; identical to SEQ ID NO: 9612

SEQ ID NO: 219720 - DNA, 633 bp, Canis familiaris; identical to SEQ ID NO: 9613

SEQ ID NO: 219721 - DNA, 391 bp, Canis familiaris; identical to SEQ ID NO: 9614

SEQ ID NO: 219722 - DNA, 545 bp, Canis familiaris; identical to SEQ ID NO: 9615

SEQ ID NO: 219723 - DNA, 639 bp, Canis familiaris; identical to SEQ ID NO: 9616

SEQ ID NO: 219724 - DNA, 554 bp, Canis familiaris; identical to SEQ ID NO: 9617

SEQ ID NO: 219725 - DNA, 619 bp, Canis familiaris; identical to SEQ ID NO: 9618

SEQ ID NO: 219726 - DNA, 462 bp, Canis familiaris; identical to SEQ ID NO: 9619

SEQ ID NO: 219727 - DNA, 228 bp, Canis familiaris; identical to SEQ ID NO: 9620

SEQ ID NO: 219728 - DNA, 596 bp, Canis familiaris; identical to SEQ ID NO: 9621

SEQ ID NO: 219729 - DNA, 587 bp, Canis familiaris; identical to SEQ ID NO: 9622

SEQ ID NO: 219730 - DNA, 598 bp, Canis familiaris; identical to SEQ ID NO: 9623

SEQ ID NO: 219731 - DNA, 215 bp, Canis familiaris; identical to SEQ ID NO: 9624

SEQ ID NO: 219732 - DNA, 590 bp, Canis familiaris; identical to SEQ ID NO: 9625

SEQ ID NO: 219733 - DNA, 547 bp, Canis familiaris; identical to SEQ ID NO: 9626

SEQ ID NO: 219734 - DNA, 656 bp, Canis familiaris; identical to SEQ ID NO: 9627

SEQ ID NO: 219735 - DNA, 667 bp, Canis familiaris; identical to SEQ ID NO: 9628

SEQ ID NO: 219736 - DNA, 633 bp, Canis familiaris; identical to SEQ ID NO: 9629
  misc_feature (153)..(153): n is a, c, g, or t

SEQ ID NO: 219737 - DNA, 537 bp, Canis familiaris; identical to SEQ ID NO: 9630

SEQ ID NO: 219738 - DNA, 613 bp, Canis familiaris; identical to SEQ ID NO: 9631

SEQ ID NO: 219739 - DNA, 152 bp, Canis familiaris; identical to SEQ ID NO: 9632

SEQ ID NO: 219740 - DNA, 652 bp, Canis familiaris; identical to SEQ ID NO: 9633

SEQ ID NO: 219741 - DNA, 545 bp, Canis familiaris; identical to SEQ ID NO: 9634

SEQ ID NO: 219742 - DNA, 616 bp, Canis familiaris; identical to SEQ ID NO: 9635

SEQ ID NO: 219743 - DNA, 501 bp, Canis familiaris; identical to SEQ ID NO: 9636

SEQ ID NO: 219744 - DNA, 582 bp, Canis familiaris; identical to SEQ ID NO: 9637

SEQ ID NO: 219745 - DNA, 648 bp, Canis familiaris; identical to SEQ ID NO: 9638

SEQ ID NO: 219746 - DNA, 625 bp, Canis familiaris; identical to SEQ ID NO: 9639

SEQ ID NO: 219747 - DNA, 664 bp, Canis familiaris; identical to SEQ ID NO: 9640

SEQ ID NO: 219748 - DNA, 685 bp, Canis familiaris; identical to SEQ ID NO: 9641

SEQ ID NO: 219749 - DNA, 677 bp, Canis familiaris; identical to SEQ ID NO: 9642

SEQ ID NO: 219750 - DNA, 268 bp, Canis familiaris; identical to SEQ ID NO: 9643

SEQ ID NO: 219751 - DNA, 657 bp, Canis familiaris; identical to SEQ ID NO: 9644

SEQ ID NO: 219752 - DNA, 615 bp, Canis familiaris; identical to SEQ ID NO: 9645

SEQ ID NO: 219753 - DNA, 582 bp, Canis familiaris; identical to SEQ ID NO: 9646

SEQ ID NO: 219754 - DNA, 552 bp, Canis familiaris; identical to SEQ ID NO: 9647

SEQ ID NO: 219755 - DNA, 572 bp, Canis familiaris; identical to SEQ ID NO: 9648

SEQ ID NO: 219756 - DNA, 627 bp, Canis familiaris; identical to SEQ ID NO: 9649

SEQ ID NO: 219757 - DNA, 624 bp, Canis familiaris; identical to SEQ ID NO: 9650

SEQ ID NO: 219758 - DNA, 629 bp, Canis familiaris; identical to SEQ ID NO: 9651

SEQ ID NO: 219759 - DNA, 574 bp, Canis familiaris; identical to SEQ ID NO: 9652

SEQ ID NO: 219760 - DNA, 628 bp, Canis familiaris; identical to SEQ ID NO: 9653

SEQ ID NO: 219761 - DNA, 531 bp, Canis familiaris; identical to SEQ ID NO: 9654

SEQ ID NO: 219762 - DNA, 598 bp, Canis familiaris; identical to SEQ ID NO: 9655

SEQ ID NO: 219763 - DNA, 595 bp, Canis familiaris; identical to SEQ ID NO: 9656
  misc_feature (1)..(1): n is a, c, g, or t

SEQ ID NO: 219764 - DNA, 532 bp, Canis familiaris; identical to SEQ ID NO: 9657

SEQ ID NO: 219765 - DNA, 617 bp, Canis familiaris; identical to SEQ ID NO: 9658
  misc_feature (15)..(15): n is a, c, g, or t

SEQ ID NO: 219766 - DNA, 544 bp, Canis familiaris; identical to SEQ ID NO: 9659

SEQ ID NO: 219767 - DNA, 642 bp, Canis familiaris; identical to SEQ ID NO: 9660

SEQ ID NO: 219768 - DNA, 632 bp, Canis familiaris; identical to SEQ ID NO: 9661

SEQ ID NO: 219769 - DNA, 613 bp, Canis familiaris; identical to SEQ ID NO: 9662
  misc_feature (396)..(396): n is a, c, g, or t

SEQ ID NO: 219770 - DNA, 596 bp, Canis familiaris; identical to SEQ ID NO: 9663

SEQ ID NO: 219771 - DNA, 624 bp, Canis familiaris; identical to SEQ ID NO: 9664

SEQ ID NO: 219772 - DNA, 583 bp, Canis familiaris; identical to SEQ ID NO: 9665
  misc_feature (15)..(15): n is a, c, g, or t
  misc_feature (271)..(271): n is a, c, g, or t

SEQ ID NO: 219773 - DNA, 598 bp, Canis familiaris; identical to SEQ ID NO: 9666
  misc_feature (86)..(86): n is a, c, g, or t
  misc_feature (142)..(142): n is a, c, g, or t
  misc_feature (146)..(146): n is a, c, g, or t

SEQ ID NO: 219774 - DNA, 545 bp, Canis familiaris; identical to SEQ ID NO: 9667

SEQ ID NO: 219775 - DNA, 524 bp, Canis familiaris; identical to SEQ ID NO: 9668

SEQ ID NO: 219776 - DNA, 651 bp, Canis familiaris; identical to SEQ ID NO: 9669

SEQ ID NO: 219777 - DNA, 522 bp, Canis familiaris; identical to SEQ ID NO: 9670

SEQ ID NO: 219778 - DNA, 614 bp, Canis familiaris; identical to SEQ ID NO: 9671

SEQ ID NO: 219779 - DNA, 281 bp, Canis familiaris; identical to SEQ ID NO: 9672

SEQ ID NO: 219780 - DNA, 394 bp, Canis familiaris; identical to SEQ ID NO: 9673

SEQ ID NO: 219781 - DNA, 491 bp, Canis familiaris; identical to SEQ ID NO: 9674

SEQ ID NO: 219782 - DNA, 637 bp, Canis familiaris; identical to SEQ ID NO: 9675

SEQ ID NO: 219783 - DNA, 107 bp, Canis familiaris; identical to SEQ ID NO: 9676
  misc_feature (1)..(1): n is a, c, g, or t

SEQ ID NO: 219784 - DNA, 420 bp, Canis familiaris; identical to SEQ ID NO: 9677
  misc_feature (165)..(165): n is a, c, g, or t

SEQ ID NO: 219785 - DNA, 486 bp, Canis familiaris; identical to SEQ ID NO: 9678

SEQ ID NO: 219786 - DNA, 220 bp, Canis familiaris; identical to SEQ ID NO: 9679

SEQ ID NO: 219787 - DNA, 607 bp, Canis familiaris; identical to SEQ ID NO: 9680

SEQ ID NO: 219788 - DNA, 380 bp, Canis familiaris; identical to SEQ ID NO: 9681

SEQ ID NO: 219789 - DNA, 532 bp, Canis familiaris; identical to SEQ ID NO: 9682
  misc_feature (1)..(1): n is a, c, g, or t

SEQ ID NO: 219790 - DNA, 592 bp, Canis familiaris; identical to SEQ ID NO: 9683

SEQ ID NO: 219791 - DNA, 703 bp, Canis familiaris; identical to SEQ ID NO: 9684

SEQ ID NO: 219792 - DNA, 455 bp, Canis familiaris; identical to SEQ ID NO: 9685

SEQ ID NO: 219793 - DNA, 312 bp, Canis familiaris; identical to SEQ ID NO: 9686

SEQ ID NO: 219794 - DNA, 724 bp, Canis familiaris; identical to SEQ ID NO: 9687
  misc_feature (274)..(274): n is a, c, g, or t
  misc_feature (423)..(423): n is a, c, g, or t

SEQ ID NO: 219795 - DNA, 420 bp, Canis familiaris; identical to SEQ ID NO: 9688

SEQ ID NO: 219796 - DNA, 343 bp, Canis familiaris; identical to SEQ ID NO: 9689

SEQ ID NO: 219797 - DNA, 642 bp, Canis familiaris; identical to SEQ ID NO: 9690
  misc_feature (31)..(31): n is a, c, g, or t

SEQ ID NO: 219798 - DNA, 322 bp, Canis familiaris; identical to SEQ ID NO: 9691
  misc_feature (185)..(185): n is a, c, g, or t
  misc_feature (198)..(198): n is a, c, g, or t

SEQ ID NO: 219799 - DNA, 528 bp, Canis familiaris; identical to SEQ ID NO: 9692

SEQ ID NO: 219800 - DNA, 543 bp, Canis familiaris; identical to SEQ ID NO: 9693
  misc_feature (498)..(498): n is a, c, g, or t

SEQ ID NO: 219801 - DNA, 310 bp, Canis familiaris; identical to SEQ ID NO: 9694

SEQ ID NO: 219802 - DNA, 541 bp, Canis familiaris; identical to SEQ ID NO: 9695

SEQ ID NO: 219803 - DNA, 620 bp, Canis familiaris; identical to SEQ ID NO: 9696
  misc_feature (41)..(41): n is a, c, g, or t
  misc_feature (125)..(126): n is a, c, g, or t
  misc_feature (161)..(161): n is a, c, g, or t
  misc_feature (168)..(168): n is a, c, g, or t
  misc_feature (418)..(418): n is a, c, g, or t

SEQ ID NO: 219804 - DNA, 654 bp, Canis familiaris; identical to SEQ ID NO: 9697

SEQ ID NO: 219805 - DNA, 671 bp, Canis familiaris; identical to SEQ ID NO: 9698

SEQ ID NO: 219806 - DNA, 331 bp, Canis familiaris; identical to SEQ ID NO: 9699
  misc_feature (207)..(208): n is a, c, g, or t

SEQ ID NO: 219807 - DNA, 596 bp, Canis familiaris; identical to SEQ ID NO: 9700

SEQ ID NO: 219808 - DNA, 666 bp, Canis familiaris; identical to SEQ ID NO: 9701

SEQ ID NO: 219809 - DNA, 582 bp, Canis familiaris; identical to SEQ ID NO: 9702

SEQ ID NO: 219810 - DNA, 784 bp, Canis familiaris; identical to SEQ ID NO: 9703

SEQ ID NO: 219811 - DNA, 623 bp, Canis familiaris; identical to SEQ ID NO: 9704

SEQ ID NO: 219812 - DNA, 651 bp, Canis familiaris; identical to SEQ ID NO: 9705
  misc_feature (78)..(78): n is a, c, g, or t

SEQ ID NO: 219813 - DNA, 550 bp, Canis familiaris; identical to SEQ ID NO: 9706
  misc_feature (1)..(1): n is a, c, g, or t

SEQ ID NO: 219814 - DNA, 730 bp, Canis familiaris; identical to SEQ ID NO: 9707
  misc_feature (1)..(1): n is a, c, g, or t
  misc_feature (265)..(265): n is a, c, g, or t
  misc_feature (273)..(273): n is a, c, g, or t
  misc_feature (318)..(318): n is a, c, g, or t
  misc_feature (343)..(343): n is a, c, g, or t

SEQ ID NO: 219815 - DNA, 704 bp, Canis familiaris; identical to SEQ ID NO: 9708
  misc_feature (320)..(320): n is a, c, g, or t

SEQ ID NO: 219816 - DNA, 455 bp, Canis familiaris; identical to SEQ ID NO: 9709

SEQ ID NO: 219817 - DNA, 647 bp, Canis familiaris; identical to SEQ ID NO: 9710

SEQ ID NO: 219818 - DNA, 618 bp, Canis familiaris; identical to SEQ ID NO: 9711
  misc_feature (1)..(1): n is a, c, g, or t

SEQ ID NO: 219819 - DNA, 541 bp, Canis familiaris; identical to SEQ ID NO: 9712

SEQ ID NO: 219820 - DNA, 135 bp, Canis familiaris; identical to SEQ ID NO: 9713

SEQ ID NO: 219821 - DNA, 602 bp, Canis familiaris; identical to SEQ ID NO: 9714

SEQ ID NO: 219822 - DNA, 604 bp, Canis familiaris; identical to SEQ ID NO: 9715
  misc_feature (66)..(66): n is a, c, g, or t
  misc_feature (196)..(196): n is a, c, g, or t

SEQ ID NO: 219823 - DNA, 589 bp, Canis familiaris; identical to SEQ ID NO: 9716

SEQ ID NO: 219824 - DNA, 529 bp, Canis familiaris; identical to SEQ ID NO: 9717

SEQ ID NO: 219825 - DNA, 511 bp, Canis familiaris; identical to SEQ ID NO: 9718

SEQ ID NO: 219826 - DNA, 507 bp, Canis familiaris; identical to SEQ ID NO: 9719

SEQ ID NO: 219827 - DNA, 633 bp, Canis familiaris; identical to SEQ ID NO: 9720
  misc_feature (1)..(1): n is a, c, g, or t

SEQ ID NO: 219828 - DNA, 590 bp, Canis familiaris; identical to SEQ ID NO: 9721

SEQ ID NO: 219829 - DNA, 535 bp, Canis familiaris; identical to SEQ ID NO: 9722

SEQ ID NO: 219830 - DNA, 641 bp, Canis familiaris; identical to SEQ ID NO: 9723

SEQ ID NO: 219831 - DNA, 641 bp, Canis familiaris; identical to SEQ ID NO: 9724

SEQ ID NO: 219832 - DNA, 645 bp, Canis familiaris; identical to SEQ ID NO: 9725
  misc_feature (20)..(20): n is a, c, g, or t

SEQ ID NO: 219833 - DNA, 543 bp, Canis familiaris; identical to SEQ ID NO: 9726

SEQ ID NO: 219834 - DNA, 532 bp, Canis familiaris; identical to SEQ ID NO: 9727

SEQ ID NO: 219835 - DNA, 573 bp, Canis familiaris; identical to SEQ ID NO: 9728

SEQ ID NO: 219836 - DNA, 599 bp, Canis familiaris; identical to SEQ ID NO: 9729

SEQ ID NO: 219837 - DNA, 151 bp, Canis familiaris; identical to SEQ ID NO: 9730
  misc_feature (1)..(1): n is a, c, g, or t

SEQ ID NO: 219838 - DNA, 647 bp, Canis familiaris; identical to SEQ ID NO: 9731

SEQ ID NO: 219839 - DNA, 654 bp, Canis familiaris; identical to SEQ ID NO: 9732

SEQ ID NO: 219840 - DNA, 660 bp, Canis familiaris; identical to SEQ ID NO: 9733
  misc_feature (182)..(182): n is a, c, g, or t

SEQ ID NO: 219841 - DNA, 579 bp, Canis familiaris; identical to SEQ ID NO: 9734

SEQ ID NO: 219842 - DNA, 627 bp, Canis familiaris; identical to SEQ ID NO: 9735

SEQ ID NO: 219843 - DNA, 667 bp, Canis familiaris; identical to SEQ ID NO: 9736

SEQ ID NO: 219844 - DNA, 700 bp, Canis familiaris; identical to SEQ ID NO: 9737

SEQ ID NO: 219845 - DNA, 709 bp, Canis familiaris; identical to SEQ ID NO: 9738

SEQ ID NO: 219846 - DNA, 590 bp, Canis familiaris; identical to SEQ ID NO: 9739

SEQ ID NO: 219847 - DNA, 633 bp, Canis familiaris; identical to SEQ ID NO: 9740

SEQ ID NO: 219848 - DNA, 611 bp, Canis familiaris; identical to SEQ ID NO: 9741

SEQ ID NO: 219849 - DNA, 484 bp, Canis familiaris; identical to SEQ ID NO: 9742

SEQ ID NO: 219850 - DNA, 382 bp, Canis familiaris; identical to SEQ ID NO: 9743

SEQ ID NO: 219851 - DNA, 612 bp, Canis familiaris; identical to SEQ ID NO: 9744

SEQ ID NO: 219852 - DNA, 611 bp, Canis familiaris; identical to SEQ ID NO: 9745
  misc_feature (344)..(344): n is a, c, g, or t

SEQ ID NO: 219853 - DNA, 640 bp, Canis familiaris; identical to SEQ ID NO: 9746

SEQ ID NO: 219854 - DNA, 635 bp, Canis familiaris; identical to SEQ ID NO: 9747
  misc_feature (141)..(141): n is a, c, g, or t
  misc_feature (165)..(165): n is a, c, g, or t

SEQ ID NO: 219855 - DNA, 546 bp, Canis familiaris; identical to SEQ ID NO: 9748

SEQ ID NO: 219856 - DNA, 659 bp, Canis familiaris; identical to SEQ ID NO: 9749

SEQ ID NO: 219857 - DNA, 643 bp, Canis familiaris; identical to SEQ ID NO: 9750

SEQ ID NO: 219858 - DNA, 541 bp, Canis familiaris; identical to SEQ ID NO: 9751

SEQ ID NO: 219859 - DNA, 599 bp, Canis familiaris; identical to SEQ ID NO: 9752

SEQ ID NO: 219860 - DNA, 670 bp, Canis familiaris; identical to SEQ ID NO: 9753
  misc_feature (287)..(288): n is a, c, g, or t
  misc_feature (320)..(320): n is a, c, g, or t
  misc_feature (356)..(356): n is a, c, g, or t

SEQ ID NO: 219861 - DNA, 505 bp, Canis familiaris; identical to SEQ ID NO: 9754

SEQ ID NO: 219862 - DNA, 618 bp, Canis familiaris; identical to SEQ ID NO: 9755

SEQ ID NO: 219863 - DNA, 649 bp, Canis familiaris; identical to SEQ ID NO: 9756

SEQ ID NO: 219864 - DNA, 645 bp, Canis familiaris; identical to SEQ ID NO: 9757

SEQ ID NO: 219865 - DNA, 672 bp, Canis familiaris; identical to SEQ ID NO: 9758

SEQ ID NO: 219866 - DNA, 625 bp, Canis familiaris; identical to SEQ ID NO: 9759

SEQ ID NO: 219867 - DNA, 632 bp, Canis familiaris; identical to SEQ ID NO: 9760

SEQ ID NO: 219868 - DNA, 394 bp, Canis familiaris; identical to SEQ ID NO: 9761

SEQ ID NO: 219869 - DNA, 676 bp, Canis familiaris; identical to SEQ ID NO: 9762

SEQ ID NO: 219870 - DNA, 643 bp, Canis familiaris; identical to SEQ ID NO: 9763

SEQ ID NO: 219871 - DNA, 650 bp, Canis familiaris; identical to SEQ ID NO: 9764

SEQ ID NO: 219872 - DNA, 646 bp, Canis familiaris; identical to SEQ ID NO: 9765

SEQ ID NO: 219873 - DNA, 683 bp, Canis familiaris; identical to SEQ ID NO: 9766

SEQ ID NO: 219874 - DNA, 628 bp, Canis familiaris; identical to SEQ ID NO: 9767

SEQ ID NO: 219875 - DNA, 583 bp, Canis familiaris; identical to SEQ ID NO: 9768

SEQ ID NO: 219876 - DNA, 506 bp, Canis familiaris; identical to SEQ ID NO: 9769

SEQ ID NO: 219877 - DNA, 519 bp, Canis familiaris; identical to SEQ ID NO: 9770

SEQ ID NO: 219878 - DNA, 443 bp, Canis familiaris; identical to SEQ ID NO: 9771

SEQ ID NO: 219879 - DNA, 635 bp, Canis familiaris; identical to SEQ ID NO: 9772

SEQ ID NO: 219880 - DNA, 578 bp, Canis familiaris; identical to SEQ ID NO: 9773

SEQ ID NO: 219881 - DNA, 697 bp, Canis familiaris; identical to SEQ ID NO: 9774
  misc_feature (166)..(166): n is a, c, g, or t

SEQ ID NO: 219882 - DNA, 286 bp, Canis familiaris; identical to SEQ ID NO: 9775

SEQ ID NO: 219883 - DNA, 569 bp, Canis familiaris; identical to SEQ ID NO: 9776

SEQ ID NO: 219884 - DNA, 688 bp, Canis familiaris; identical to SEQ ID NO: 9777
  misc_feature (1)..(1): n is a, c, g, or t

SEQ ID NO: 219885 - DNA, 103 bp, Canis familiaris; identical to SEQ ID NO: 9778

SEQ ID NO: 219886 - DNA, 328 bp, Canis familiaris; identical to SEQ ID NO: 9779

SEQ ID NO: 219887 - DNA, 536 bp, Canis familiaris; identical to SEQ ID NO: 9780
  misc_feature (36)..(36): n is a, c, g, or t

SEQ ID NO: 219888 - DNA, 214 bp, Canis familiaris; identical to SEQ ID NO: 9781
  misc_feature (1)..(1): n is a, c, g, or t
  misc_feature (5)..(5): n is a, c, g, or t
  misc_feature (16)..(16): n is a, c, g, or t
  misc_feature (24)..(24): n is a, c, g, or t
  misc_feature (55)..(55): n is a, c, g, or t
  misc_feature (63)..(63): n is a, c, g, or t
  misc_feature (103)..(103): n is a, c, g, or t
  misc_feature (111)..(111): n is a, c, g, or t

SEQ ID NO: 219889 - DNA, 563 bp, Canis familiaris; identical to SEQ ID NO: 9782

SEQ ID NO: 219890 - DNA, 389 bp, Canis familiaris; identical to SEQ ID NO: 9783

SEQ ID NO: 219891 - DNA, 251 bp, Canis familiaris; identical to SEQ ID NO: 9784

SEQ ID NO: 219892 - DNA, 572 bp, Canis familiaris; identical to SEQ ID NO: 9785
  misc_feature (1)..(1): n is a, c, g, or t

SEQ ID NO: 219893 - DNA, 592 bp, Canis familiaris; identical to SEQ ID NO: 9786

SEQ ID NO: 219894 - DNA, 635 bp, Canis familiaris; identical to SEQ ID NO: 9787

SEQ ID NO: 219895 - DNA, 462 bp, Canis familiaris; identical to SEQ ID NO: 9788

SEQ ID NO: 219896 - DNA, 660 bp, Canis familiaris; identical to SEQ ID NO: 9789
  misc_feature (1)..(1): n is a, c, g, or t

SEQ ID NO: 219897 - DNA, 571 bp, Canis familiaris; identical to SEQ ID NO: 9790

SEQ ID NO: 219898 - DNA, 679 bp, Canis familiaris; identical to SEQ ID NO: 9791

SEQ ID NO: 219899 - DNA, 643 bp, Canis familiaris; identical to SEQ ID NO: 9792

SEQ ID NO: 219900 - DNA, 181 bp, Canis familiaris; identical to SEQ ID NO: 9793

SEQ ID NO: 219901 - DNA, 588 bp, Canis familiaris; identical to SEQ ID NO: 9794

SEQ ID NO: 219902 - DNA, 106 bp, Canis familiaris; identical to SEQ ID NO: 9795
  misc_feature (1)..(1): n is a, c, g, or t

SEQ ID NO: 219903 - DNA, 579 bp, Canis familiaris; identical to SEQ ID NO: 9796
  misc_feature (130)..(130): n is a, c, g, or t

SEQ ID NO: 219904 - DNA, 594 bp, Canis familiaris; identical to SEQ ID NO: 9797

SEQ ID NO: 219905 - DNA, 563 bp, Canis familiaris; identical to SEQ ID NO: 9798
  misc_feature (151)..(151): n is a, c, g, or t

SEQ ID NO: 219906 - DNA, 544 bp, Canis familiaris; identical to SEQ ID NO: 9799

SEQ ID NO: 219907 - DNA, 576 bp, Canis familiaris; identical to SEQ ID NO: 9800

SEQ ID NO: 219908 - DNA, 514 bp, Canis familiaris; identical to SEQ ID NO: 9801

SEQ ID NO: 219909 - DNA, 637 bp, Canis familiaris; identical to SEQ ID NO: 9802

SEQ ID NO: 219910 - DNA, 675 bp, Canis familiaris; identical to SEQ ID NO: 9803

SEQ ID NO: 219911 - DNA, 236 bp, Canis familiaris; identical to SEQ ID NO: 9804

SEQ ID NO: 219912 - DNA, 614 bp, Canis familiaris; identical to SEQ ID NO: 9805

SEQ ID NO: 219913 - DNA, 631 bp, Canis familiaris; identical to SEQ ID NO: 9806
  misc_feature (1)..(1): n is a, c, g, or t

SEQ ID NO: 219914 - DNA, 500 bp, Canis familiaris; identical to SEQ ID NO: 9807

SEQ ID NO: 219915 - DNA, 595 bp, Canis familiaris; identical to SEQ ID NO: 9808
  misc_feature (394)..(395): n is a, c, g, or t

SEQ ID NO: 219916 - DNA, 583 bp, Canis familiaris; identical to SEQ ID NO: 9809

SEQ ID NO: 219917 - DNA, 623 bp, Canis familiaris; identical to SEQ ID NO: 9810

SEQ ID NO: 219918 - DNA, 647 bp, Canis familiaris; identical to SEQ ID NO: 9811

SEQ ID NO: 219919 - DNA, 496 bp, Canis familiaris; identical to SEQ ID NO: 9812

SEQ ID NO: 219920 - DNA, 542 bp, Canis familiaris; identical to SEQ ID NO: 9813

SEQ ID NO: 219921 - DNA, 494 bp, Canis familiaris; identical to SEQ ID NO: 9814

SEQ ID NO: 219922 - DNA, 619 bp, Canis familiaris; identical to SEQ ID NO: 9815

SEQ ID NO: 219923 - DNA, 536 bp, Canis familiaris; identical to SEQ ID NO: 9816

SEQ ID NO: 219924 - DNA, 621 bp, Canis familiaris; identical to SEQ ID NO: 9817

SEQ ID NO: 219925 - DNA, 646 bp, Canis familiaris; identical to SEQ ID NO: 9818
  misc_feature (1)..(1): n is a, c, g, or t

SEQ ID NO: 219926 - DNA, 649 bp, Canis familiaris; identical to SEQ ID NO: 9819
  misc_feature (44)..(44): n is a, c, g, or t

SEQ ID NO: 219927 - DNA, 641 bp, Canis familiaris; identical to SEQ ID NO: 9820
  misc_feature (394)..(394): n is a, c, g, or t

SEQ ID NO: 219928 - DNA, 579 bp, Canis familiaris; identical to SEQ ID NO: 9821

SEQ ID NO: 219929 - DNA, 572 bp, Canis familiaris; identical to SEQ ID NO: 9822

SEQ ID NO: 219930 - DNA, 472 bp, Canis familiaris; identical to SEQ ID NO: 9823

SEQ ID NO: 219931 - DNA, 438 bp, Canis familiaris; identical to SEQ ID NO: 9824

SEQ ID NO: 219932 - DNA, 603 bp, Canis familiaris; identical to SEQ ID NO: 9825
  misc_feature (191)..(191): n is a, c, g, or t

SEQ ID NO: 219933 - DNA, 539 bp, Canis familiaris; identical to SEQ ID NO: 9826

SEQ ID NO: 219934 - DNA, 683 bp, Canis familiaris; identical to SEQ ID NO: 9827

SEQ ID NO: 219935 - DNA, 384 bp, Canis familiaris; identical to SEQ ID NO: 9828

SEQ ID NO: 219936 - DNA, 632 bp, Canis familiaris; identical to SEQ ID NO: 9829

SEQ ID NO: 219937 - DNA, 556 bp, Canis familiaris; identical to SEQ ID NO: 9830

SEQ ID NO: 219938 - DNA, 369 bp, Canis familiaris; identical to SEQ ID NO: 9831

SEQ ID NO: 219939 - DNA, 645 bp, Canis familiaris; identical to SEQ ID NO: 9832

SEQ ID NO: 219940 - DNA, 603 bp, Canis familiaris; identical to SEQ ID NO: 9833

SEQ ID NO: 219941 - DNA, 701 bp, Canis familiaris; identical to SEQ ID NO: 9834

SEQ ID NO: 219942 - DNA, 636 bp, Canis familiaris; identical to SEQ ID NO: 9835
  misc_feature (321)..(321): n is a, c, g, or t

SEQ ID NO: 219943 - DNA, 509 bp, Canis familiaris; identical to SEQ ID NO: 9836

SEQ ID NO: 219944 - DNA, 589 bp, Canis familiaris; identical to SEQ ID NO: 9837

SEQ ID NO: 219945 - DNA, 299 bp, Canis familiaris; identical to SEQ ID NO: 9838

SEQ ID NO: 219946 - DNA, 569 bp, Canis familiaris; identical to SEQ ID NO: 9839

SEQ ID NO: 219947 - DNA, 601 bp, Canis familiaris; identical to SEQ ID NO: 9840
  misc_feature (504)..(504): n is a, c, g, or t

SEQ ID NO: 219948 - DNA, 669 bp, Canis familiaris; identical to SEQ ID NO: 9841
  misc_feature (1)..(1): n is a, c, g, or t

SEQ ID NO: 219949 - DNA, 666 bp, Canis familiaris; identical to SEQ ID NO: 9842

SEQ ID NO: 219950 - DNA, 677 bp, Canis familiaris; identical to SEQ ID NO: 9843

SEQ ID NO: 219951 - DNA, 632 bp, Canis familiaris; identical to SEQ ID NO: 9844
  misc_feature (149)..(149): n is a, c, g, or t

SEQ ID NO: 219952 - DNA, 596 bp, Canis familiaris; identical to SEQ ID NO: 9845

SEQ ID NO: 219953 - DNA, 601 bp, Canis familiaris; identical to SEQ ID NO: 9846

SEQ ID NO: 219954 - DNA, 660 bp, Canis familiaris; identical to SEQ ID NO: 9847

SEQ ID NO: 219955 - DNA, 604 bp, Canis familiaris; identical to SEQ ID NO: 9848

SEQ ID NO: 219956 - DNA, 534 bp, Canis familiaris; identical to SEQ ID NO: 9849
  misc_feature (423)..(423): n is a, c, g, or t

SEQ ID NO: 219957 - DNA, 182 bp, Canis familiaris; identical to SEQ ID NO: 9850

SEQ ID NO: 219958 - DNA, 408 bp, Canis familiaris; identical to SEQ ID NO: 9851

SEQ ID NO: 219959 - DNA, 125 bp, Canis familiaris; identical to SEQ ID NO: 9852

SEQ ID NO: 219960 - DNA, 249 bp, Canis familiaris; identical to SEQ ID NO: 9853

SEQ ID NO: 219961 - DNA, 613 bp, Canis familiaris; identical to SEQ ID NO: 9854

SEQ ID NO: 219962 - DNA, 566 bp, Canis familiaris; identical to SEQ ID NO: 9855

SEQ ID NO: 219963 - DNA, 571 bp, Canis familiaris; identical to SEQ ID NO: 9856
  misc_feature (70)..(70): n is a, c, g, or t

SEQ ID NO: 219964 - DNA, 172 bp, Canis familiaris; identical to SEQ ID NO: 9857

SEQ ID NO: 219965 - DNA, 620 bp, Canis familiaris; identical to SEQ ID NO: 9858

SEQ ID NO: 219966 - DNA, 102 bp, Canis familiaris; identical to SEQ ID NO: 9859

SEQ ID NO: 219967 - DNA, 506 bp, Canis familiaris; identical to SEQ ID NO: 9860

SEQ ID NO: 219968 - DNA, 106 bp, Canis familiaris; identical to SEQ ID NO: 9861

SEQ ID NO: 219969 - DNA, 617 bp, Canis familiaris; identical to SEQ ID NO: 9862

SEQ ID NO: 219970 - DNA, 666 bp, Canis familiaris; identical to SEQ ID NO: 9863

SEQ ID NO: 219971 - DNA, 472 bp, Canis familiaris; identical to SEQ ID NO: 9864

SEQ ID NO: 219972 - DNA, 635 bp, Canis familiaris; identical to SEQ ID NO: 9865

SEQ ID NO: 219973 - DNA, 640 bp, Canis familiaris; identical to SEQ ID NO: 9866
  misc_feature (356)..(356): n is a, c, g, or t

SEQ ID NO: 219974 - DNA, 591 bp, Canis familiaris; identical to SEQ ID NO: 9867

SEQ ID NO: 219975 - DNA, 582 bp, Canis familiaris; identical to SEQ ID NO: 9868
  misc_feature (9)..(9): n is a, c, g, or t

SEQ ID NO: 219976 - DNA, 657 bp, Canis familiaris; identical to SEQ ID NO: 9869
  misc_feature (543)..(543): n is a, c, g, or t

SEQ ID NO: 219977 - DNA, 368 bp, Canis familiaris; identical to SEQ ID NO: 9870

SEQ ID NO: 219978 - DNA, 583 bp, Canis familiaris; identical to SEQ ID NO: 9871

SEQ ID NO: 219979 - DNA, 683 bp, Canis familiaris; identical to SEQ ID NO: 9872

SEQ ID NO: 219980 - DNA, 628 bp, Canis familiaris; identical to SEQ ID NO: 9873
  misc_feature (279)..(279): n is a, c, g, or t

SEQ ID NO: 219981 - DNA, 526 bp, Canis familiaris; identical to SEQ ID NO: 9874
  misc_feature (142)..(142): n is a, c, g, or t

SEQ ID NO: 219982 - DNA, 689 bp, Canis familiaris; identical to SEQ ID NO: 9875

SEQ ID NO: 219983 - DNA, 621 bp, Canis familiaris; identical to SEQ ID NO: 9876

SEQ ID NO: 219984 - DNA, 602 bp, Canis familiaris; identical to SEQ ID NO: 9877

SEQ ID NO: 219985 - DNA, 723 bp, Canis familiaris; identical to SEQ ID NO: 9878

SEQ ID NO: 219986 - DNA, 653 bp, Canis familiaris; identical to SEQ ID NO: 9879

SEQ ID NO: 219987 - DNA, 109 bp, Canis familiaris; identical to SEQ ID NO: 9880
  misc_feature (1)..(1): n is a, c, g, or t

SEQ ID NO: 219988 - DNA, 564 bp, Canis familiaris; identical to SEQ ID NO: 9881

SEQ ID NO: 219989 - DNA, 666 bp, Canis familiaris; identical to SEQ ID NO: 9882
  misc_feature (86)..(86): n is a, c, g, or t
  misc_feature (101)..(102): n is a, c, g, or t
  misc_feature (117)..(117): n is a, c, g, or t
  misc_feature (125)..(126): n is a, c, g, or t
  misc_feature (158)..(159): n is a, c, g, or t
  misc_feature (169)..(169): n is a, c, g, or t
  misc_feature (199)..(199): n is a, c, g, or t
  misc_feature (259)..(259): n is a, c, g, or t
  misc_feature (271)..(271): n is a, c, g, or t
  misc_feature (285)..(286): n is a, c, g, or t

SEQ ID NO: 219990 - DNA, 553 bp, Canis familiaris; identical to SEQ ID NO: 9883

SEQ ID NO: 219991 - DNA, 686 bp, Canis familiaris; identical to SEQ ID NO: 9884
  misc_feature (1)..(1): n is a, c, g, or t

SEQ ID NO: 219992 - DNA, 572 bp, Canis familiaris; identical to SEQ ID NO: 9885
  misc_feature (376)..(376): n is a, c, g, or t

SEQ ID NO: 219993 - DNA, 685 bp, Canis familiaris; identical to SEQ ID NO: 9886

SEQ ID NO: 219994 - DNA, 338 bp, Canis familiaris; identical to SEQ ID NO: 9887

SEQ ID NO: 219995 - DNA, 618 bp, Canis familiaris; identical to SEQ ID NO: 9888

SEQ ID NO: 219996 - DNA, 584 bp, Canis familiaris; identical to SEQ ID NO: 9889
  misc_feature (1)..(1): n is a, c, g, or t

SEQ ID NO: 219997 - DNA, 554 bp, Canis familiaris; identical to SEQ ID NO: 9890

SEQ ID NO: 219998 - DNA, 644 bp, Canis familiaris; identical to SEQ ID NO: 9891
  misc_feature (1)..(1): n is a, c, g, or t

SEQ ID NO: 219999 - DNA, 607 bp, Canis familiaris; identical to SEQ ID NO: 9892

SEQ ID NO: 220000 - DNA, 299 bp, Canis familiaris; identical to SEQ ID NO: 9893

SEQ ID NO: 220001 - DNA, 717 bp, Canis familiaris; identical to SEQ ID NO: 9894

SEQ ID NO: 220002 - DNA, 558 bp, Canis familiaris; identical to SEQ ID NO: 9895
  misc_feature (1)..(1): n is a, c, g, or t

SEQ ID NO: 220003 - DNA, 668 bp, Canis familiaris; identical to SEQ ID NO: 9896

SEQ ID NO: 220004 - DNA, 586 bp, Canis familiaris; identical to SEQ ID NO: 9897

SEQ ID NO: 220005 - DNA, 527 bp, Canis familiaris; identical to SEQ ID NO: 9898

SEQ ID NO: 220006 - DNA, 574 bp, Canis familiaris; identical to SEQ ID NO: 9899
  misc_feature (65)..(66): n is a, c, g, or t
  misc_feature (72)..(72): n is a, c, g, or t
  misc_feature (128)..(128): n is a, c, g, or t
  misc_feature (136)..(136): n is a, c, g, or t
  misc_feature (166)..(167): n is a, c, g, or t
  misc_feature (175)..(175): n is a, c, g, or t
  misc_feature (193)..(195): n is a, c, g, or t

SEQ ID NO: 220007 - DNA, 585 bp, Canis familiaris; identical to SEQ ID NO: 9900

SEQ ID NO: 220008 - DNA, 575 bp, Canis familiaris; identical to SEQ ID NO: 9901

SEQ ID NO: 220009 - DNA, 630 bp, Canis familiaris; identical to SEQ ID NO: 9902

SEQ ID NO: 220010 - DNA, 629 bp, Canis familiaris; identical to SEQ ID NO: 9903

SEQ ID NO: 220011 - DNA, 670 bp, Canis familiaris; identical to SEQ ID NO: 9904
  misc_feature (340)..(340): n is a, c, g, or t

SEQ ID NO: 220012 - DNA, 341 bp, Canis familiaris; identical to SEQ ID NO: 9905
  misc_feature (1)..(1): n is a, c, g, or t

SEQ ID NO: 220013 - DNA, 575 bp, Canis familiaris; identical to SEQ ID NO: 9906

SEQ ID NO: 220014 - DNA, 641 bp, Canis familiaris; identical to SEQ ID NO: 9907

SEQ ID NO: 220015 - DNA, 294 bp, Canis familiaris; identical to SEQ ID NO: 9908
  misc_feature (1)..(1): n is a, c, g, or t

SEQ ID NO: 220016 - DNA, 685 bp, Canis familiaris; identical to SEQ ID NO: 9909

SEQ ID NO: 220017 - DNA, 536 bp, Canis familiaris; identical to SEQ ID NO: 9910
  misc_feature (1)..(1): n is a, c, g, or t

SEQ ID NO: 220018 - DNA, 325 bp, Canis familiaris; identical to SEQ ID NO: 9911

SEQ ID NO: 220019 - DNA, 675 bp, Canis familiaris; identical to SEQ ID NO: 9912
  misc_feature (29)..(29): n is a, c, g, or t

SEQ ID NO: 220020 - DNA, 417 bp, Canis familiaris; identical to SEQ ID NO: 9913
  misc_feature (302)..(302): n is a, c, g, or t

SEQ ID NO: 220021 - DNA, 658 bp, Canis familiaris; identical to SEQ ID NO: 9914
  misc_feature (1)..(1): n is a, c, g, or t

SEQ ID NO: 220022 - DNA, 614 bp, Canis familiaris; identical to SEQ ID NO: 9915

SEQ ID NO: 220023 - DNA, 258 bp, Canis familiaris; identical to SEQ ID NO: 9916

SEQ ID NO: 220024 - DNA, 568 bp, Canis familiaris; identical to SEQ ID NO: 9917

SEQ ID NO: 220025 - DNA, 617 bp, Canis familiaris; identical to SEQ ID NO: 9918
  misc_feature (493)..(493): n is a, c, g, or t

SEQ ID NO: 220026 - DNA, 247 bp, Canis familiaris; identical to SEQ ID NO: 9919

SEQ ID NO: 220027 - DNA, 472 bp, Canis familiaris; identical to SEQ ID NO: 9920

SEQ ID NO: 220028 - DNA, 298 bp, Canis familiaris; identical to SEQ ID NO: 9921

SEQ ID NO: 220029 - DNA, 468 bp, Canis familiaris; identical to SEQ ID NO: 9922

SEQ ID NO: 220030 - DNA, 636 bp, Canis familiaris; identical to SEQ ID NO: 9923

SEQ ID NO: 220031 - DNA, 521 bp, Canis familiaris; identical to SEQ ID NO: 9924
  misc_feature (199)..(199): n is a, c, g, or t

SEQ ID NO: 220032 - DNA, 512 bp, Canis familiaris; identical to SEQ ID NO: 9925

SEQ ID NO: 220033 - DNA, 401 bp, Canis familiaris; identical to SEQ ID NO: 9926

SEQ ID NO: 220034 - DNA, 518 bp, Canis familiaris; identical to SEQ ID NO: 9927

SEQ ID NO: 220035 - DNA, 453 bp, Canis familiaris; identical to SEQ ID NO: 9928

SEQ ID NO: 220036 - DNA, 733 bp, Canis familiaris; identical to SEQ ID NO: 9929

SEQ ID NO: 220037 - DNA, 194 bp, Canis familiaris; identical to SEQ ID NO: 9930

SEQ ID NO: 220038 - DNA, 583 bp, Canis familiaris; identical to SEQ ID NO: 9931

SEQ ID NO: 220039 - DNA, 370 bp, Canis familiaris; identical to SEQ ID NO: 9932

SEQ ID NO: 220040 - DNA, 553 bp, Canis familiaris; identical to SEQ ID NO: 9933

SEQ ID NO: 220041 - DNA, 592 bp, Canis familiaris; identical to SEQ ID NO: 9934

SEQ ID NO: 220042 - DNA, 675 bp, Canis familiaris; identical to SEQ ID NO: 9935

SEQ ID NO: 220043 - DNA, 612 bp, Canis familiaris; identical to SEQ ID NO: 9936

SEQ ID NO: 220044 - DNA, 448 bp, Canis familiaris; identical to SEQ ID NO: 9937

SEQ ID NO: 220045 - DNA, 469 bp, Canis familiaris; identical to SEQ ID NO: 9938

SEQ ID NO: 220046 - DNA, 580 bp, Canis familiaris; identical to SEQ ID NO: 9939

SEQ ID NO: 220047 - DNA, 628 bp, Canis familiaris; identical to SEQ ID NO: 9940

SEQ ID NO: 220048 - DNA, 513 bp, Canis familiaris; identical to SEQ ID NO: 9941

SEQ ID NO: 220049 - DNA, 584 bp, Canis familiaris; identical to SEQ ID NO: 9942

SEQ ID NO: 220050 - DNA, 568 bp, Canis familiaris; identical to SEQ ID NO: 9943

SEQ ID NO: 220051 - DNA, 441 bp, Canis familiaris; identical to SEQ ID NO: 9944

SEQ ID NO: 220052 - DNA, 541 bp, Canis familiaris; identical to SEQ ID NO: 9945

SEQ ID NO: 220053 - DNA, 237 bp, Canis familiaris; identical to SEQ ID NO: 9946

SEQ ID NO: 220054 - DNA, 667 bp, Canis familiaris; identical to SEQ ID NO: 9947

SEQ ID NO: 220055 - DNA, 579 bp, Canis familiaris; identical to SEQ ID NO: 9948

SEQ ID NO: 220056 - DNA, 638 bp, Canis familiaris; identical to SEQ ID NO: 9949

SEQ ID NO: 220057 - DNA, 526 bp, Canis familiaris; identical to SEQ ID NO: 9950

SEQ ID NO: 220058 - DNA, 490 bp, Canis familiaris; identical to SEQ ID NO: 9951
  misc_feature (96)..(96): n is a, c, g, or t

SEQ ID NO: 220059 - DNA, 509 bp, Canis familiaris; identical to SEQ ID NO: 9952

SEQ ID NO: 220060 - DNA, 692 bp, Canis familiaris; identical to SEQ ID NO: 9953

SEQ ID NO: 220061 - DNA, 640 bp, Canis familiaris; identical to SEQ ID NO: 9954

SEQ ID NO: 220062 - DNA, 631 bp, Canis familiaris; identical to SEQ ID NO: 9955

SEQ ID NO: 220063 - DNA, 239 bp, Canis familiaris; identical to SEQ ID NO: 9956

SEQ ID NO: 220064 - DNA, 636 bp, Canis familiaris; identical to SEQ ID NO: 9957

SEQ ID NO: 220065 - DNA, 639 bp, Canis familiaris; identical to SEQ ID NO: 9958
  misc_feature (1)..(1): n is a, c, g, or t
  misc_feature (332)..(332): n is a, c, g, or t

SEQ ID NO: 220066 - DNA, 633 bp, Canis familiaris; identical to SEQ ID NO: 9959

SEQ ID NO: 220067 - DNA, 489 bp, Canis familiaris; identical to SEQ ID NO: 9960
  misc_feature (419)..(420): n is a, c, g, or t
  misc_feature (444)..(445): n is a, c, g, or t
  misc_feature (454)..(455): n is a, c, g, or t
  misc_feature (463)..(464): n is a, c, g, or t
  misc_feature (466)..(466): n is a, c, g, or t
  misc_feature (473)..(474): n is a, c, g, or t

SEQ ID NO: 220068 - DNA, 281 bp, Canis familiaris; identical to SEQ ID NO: 9961

SEQ ID NO: 220069 - DNA, 710 bp, Canis familiaris; identical to SEQ ID NO: 9962

SEQ ID NO: 220070 - DNA, 543 bp, Canis familiaris; identical to SEQ ID NO: 9963

SEQ ID NO: 220071 - DNA, 597 bp, Canis familiaris; identical to SEQ ID NO: 9964

SEQ ID NO: 220072 - DNA, 610 bp, Canis familiaris; identical to SEQ ID NO: 9965

SEQ ID NO: 220073 - DNA, 504 bp, Canis familiaris; identical to SEQ ID NO: 9966

SEQ ID NO: 220074 - DNA, 529 bp, Canis familiaris; identical to SEQ ID NO: 9967

SEQ ID NO: 220075 - DNA, 584 bp, Canis familiaris; identical to SEQ ID NO: 9968

SEQ ID NO: 220076 - DNA, 458 bp, Canis familiaris; identical to SEQ ID NO: 9969

SEQ ID NO: 220077 - DNA, 554 bp, Canis familiaris; identical to SEQ ID NO: 9970

SEQ ID NO: 220078 - DNA, 219 bp, Canis familiaris; identical to SEQ ID NO: 9971

SEQ ID NO: 220079 - DNA, 123 bp, Canis familiaris; identical to SEQ ID NO: 9972

SEQ ID NO: 220080 - DNA, 658 bp, Canis familiaris; identical to SEQ ID NO: 9973

SEQ ID NO: 220081 - DNA, 591 bp, Canis familiaris; identical to SEQ ID NO: 9974

SEQ ID NO: 220082 - DNA, 438 bp, Canis familiaris; identical to SEQ ID NO: 9975

SEQ ID NO: 220083 - DNA, 642 bp, Canis familiaris; identical to SEQ ID NO: 9976
  misc_feature (58)..(58): n is a, c, g, or t

SEQ ID NO: 220084 - DNA, 577 bp, Canis familiaris; identical to SEQ ID NO: 9977

SEQ ID NO: 220085 - DNA, 529 bp, Canis familiaris; identical to SEQ ID NO: 9978

SEQ ID NO: 220086 - DNA, 636 bp, Canis familiaris; identical to SEQ ID NO: 9979

SEQ ID NO: 220087 - DNA, 601 bp, Canis familiaris; identical to SEQ ID NO: 9980

SEQ ID NO: 220088 - DNA, 569 bp, Canis familiaris; identical to SEQ ID NO: 9981

SEQ ID NO: 220089 - DNA, 681 bp, Canis familiaris; identical to SEQ ID NO: 9982

SEQ ID NO: 220090 - DNA, 537 bp, Canis familiaris; identical to SEQ ID NO: 9983

SEQ ID NO: 220091 - DNA, 594 bp, Canis familiaris; identical to SEQ ID NO: 9984

SEQ ID NO: 220092 - DNA, 677 bp, Canis familiaris; identical to SEQ ID NO: 9985

SEQ ID NO: 220093 - DNA, 644 bp, Canis familiaris; identical to SEQ ID NO: 9986

SEQ ID NO: 220094 - DNA, 655 bp, Canis familiaris; identical to SEQ ID NO: 9987

SEQ ID NO: 220095 - DNA, 680 bp, Canis familiaris; identical to SEQ ID NO: 9988

SEQ ID NO: 220096 - DNA, 575 bp, Canis familiaris; identical to SEQ ID NO: 9989

SEQ ID NO: 220097 - DNA, 553 bp, Canis familiaris; identical to SEQ ID NO: 9990

SEQ ID NO: 220098 - DNA, 420 bp, Canis familiaris; identical to SEQ ID NO: 9991

SEQ ID NO: 220099 - DNA, 665 bp, Canis familiaris; identical to SEQ ID NO: 9992

SEQ ID NO: 220100 - DNA, 582 bp, Canis familiaris; identical to SEQ ID NO: 9993

SEQ ID NO: 220101 - DNA, 644 bp, Canis familiaris; identical to SEQ ID NO: 9994

SEQ ID NO: 220102 - DNA, 588 bp, Canis familiaris; identical to SEQ ID NO: 9995

SEQ ID NO: 220103 - DNA, 505 bp, Canis familiaris; identical to SEQ ID NO: 9996
  misc_feature (1)..(1): n is a, c, g, or t

SEQ ID NO: 220104 - DNA, 643 bp, Canis familiaris; identical to SEQ ID NO: 9997

SEQ ID NO: 220105 - DNA, 457 bp, Canis familiaris; identical to SEQ ID NO: 9998

SEQ ID NO: 220106 - DNA, 648 bp, Canis familiaris; identical to SEQ ID NO: 9999

SEQ ID NO: 220107 - DNA, 605 bp, Canis familiaris; identical to SEQ ID NO: 10000
  misc_feature (1)..(1): n is a, c, g, or t

SEQ ID NO: 220108 - DNA, 551 bp, Canis familiaris; identical to SEQ ID NO: 10001
  misc_feature (265)..(265): n is a, c, g, or t
  misc_feature (287)..(287): n is a, c, g, or t

SEQ ID NO: 220109 - DNA, 617 bp, Canis familiaris; identical to SEQ ID NO: 10002

SEQ ID NO: 220110 - DNA, 631 bp, Canis familiaris; identical to SEQ ID NO: 10003

SEQ ID NO: 220111 - DNA, 580 bp, Canis familiaris; identical to SEQ ID NO: 10004

SEQ ID NO: 220112 - DNA, 561 bp, Canis familiaris; identical to SEQ ID NO: 10005

SEQ ID NO: 220113 - DNA, 334 bp, Canis familiaris; identical to SEQ ID NO: 10006

SEQ ID NO: 220114 - DNA, 471 bp, Canis familiaris; identical to SEQ ID NO: 10007

SEQ ID NO: 220115 - DNA, 227 bp, Canis familiaris; identical to SEQ ID NO: 10008

SEQ ID NO: 220116 - DNA, 598 bp, Canis familiaris; identical to SEQ ID NO: 10009

SEQ ID NO: 220117 - DNA, 302 bp, Canis familiaris; identical to SEQ ID NO: 10010

SEQ ID NO: 220118 - DNA, 462 bp, Canis familiaris; identical to SEQ ID NO: 10011

SEQ ID NO: 220119 - DNA, 659 bp, Canis familiaris; identical to SEQ ID NO: 10012
  misc_feature (118)..(118): n is a, c, g, or t

SEQ ID NO: 220120 - DNA, 601 bp, Canis familiaris; identical to SEQ ID NO: 10013

SEQ ID NO: 220121 - DNA, 467 bp, Canis familiaris; identical to SEQ ID NO: 10014

SEQ ID NO: 220122 - DNA, 515 bp, Canis familiaris; identical to SEQ ID NO: 10015

SEQ ID NO: 220123 - DNA, 732 bp, Canis familiaris; identical to SEQ ID NO: 10016
  misc_feature (387)..(387): n is a, c, g, or t

SEQ ID NO: 220124 - DNA, 136 bp, Canis familiaris; identical to SEQ ID NO: 10017

SEQ ID NO: 220125 - DNA, 579 bp, Canis familiaris; identical to SEQ ID NO: 10018

SEQ ID NO: 220126 - DNA, 606 bp, Canis familiaris; identical to SEQ ID NO: 10019
  misc_feature (201)..(201): n is a, c, g, or t

SEQ ID NO: 220127 - DNA, 584 bp, Canis familiaris; identical to SEQ ID NO: 10020

SEQ ID NO: 220128 - DNA, 597 bp, Canis familiaris; identical to SEQ ID NO: 10021

SEQ ID NO: 220129 - DNA, 565 bp, Canis familiaris; identical to SEQ ID NO: 10022

SEQ ID NO: 220130 - DNA, 612 bp, Canis familiaris; identical to SEQ ID NO: 10023

SEQ ID NO: 220131 - DNA, 590 bp, Canis familiaris; identical to SEQ ID NO: 10024
  misc_feature (313)..(313): n is a, c, g, or t

SEQ ID NO: 220132 - DNA, 660 bp, Canis familiaris; identical to SEQ ID NO: 10025

SEQ ID NO: 220133 - DNA, 619 bp, Canis familiaris; identical to SEQ ID NO: 10026

SEQ ID NO: 220134 - DNA, 595 bp, Canis familiaris; identical to SEQ ID NO: 10027

SEQ ID NO: 220135 - DNA, 633 bp, Canis familiaris; identical to SEQ ID NO: 10028

SEQ ID NO: 220136 - DNA, 647 bp, Canis familiaris; identical to SEQ ID NO: 10029

SEQ ID NO: 220137 - DNA, 622 bp, Canis familiaris; identical to SEQ ID NO: 10030

SEQ ID NO: 220138 - DNA, 642 bp, Canis familiaris; identical to SEQ ID NO: 10031

SEQ ID NO: 220139 - DNA, 610 bp, Canis familiaris; identical to SEQ ID NO: 10032
  misc_feature (1)..(1): n is a, c, g, or t

SEQ ID NO: 220140 - DNA, 735 bp, Canis familiaris; identical to SEQ ID NO: 10033
  misc_feature (143)..(143): n is a, c, g, or t

SEQ ID NO: 220141 - DNA, 327 bp, Canis familiaris; identical to SEQ ID NO: 10034

SEQ ID NO: 220142 - DNA, 657 bp, Canis familiaris; identical to SEQ ID NO: 10035

SEQ ID NO: 220143 - DNA, 608 bp, Canis familiaris; identical to SEQ ID NO: 10036

SEQ ID NO: 220144 - DNA, 274 bp, Canis familiaris; identical to SEQ ID NO: 10037

SEQ ID NO: 220145 - DNA, 502 bp, Canis familiaris; identical to SEQ ID NO: 10038
  misc_feature (1)..(1): n is a, c, g, or t

SEQ ID NO: 220146 - DNA, 578 bp, Canis familiaris; identical to SEQ ID NO: 10039
  misc_feature (1)..(1): n is a, c, g, or t

SEQ ID NO: 220147 - DNA, 593 bp, Canis familiaris; identical to SEQ ID NO: 10040

SEQ ID NO: 220148 - DNA, 554 bp, Canis familiaris; identical to SEQ ID NO: 10041
  misc_feature (1)..(1): n is a, c, g, or t

SEQ ID NO: 220149 - DNA, 650 bp, Canis familiaris; identical to SEQ ID NO: 10042

SEQ ID NO: 220150 - DNA, 581 bp, Canis familiaris; identical to SEQ ID NO: 10043

SEQ ID NO: 220151 - DNA, 525 bp, Canis familiaris; identical to SEQ ID NO: 10044

SEQ ID NO: 220152 - DNA, 628 bp, Canis familiaris; identical to SEQ ID NO: 10045
  misc_feature (8)..(8): n is a, c, g, or t

SEQ ID NO: 220153 - DNA, 641 bp, Canis familiaris; identical to SEQ ID NO: 10046

SEQ ID NO: 220154 - DNA, 585 bp, Canis familiaris; identical to SEQ ID NO: 10047

SEQ ID NO: 220155 - DNA, 653 bp, Canis familiaris; identical to SEQ ID NO: 10048

SEQ ID NO: 220156 - DNA, 691 bp, Canis familiaris; identical to SEQ ID NO: 10049

SEQ ID NO: 220157 - DNA, 606 bp, Canis familiaris; identical to SEQ ID NO: 10050

SEQ ID NO: 220158 - DNA, 536 bp, Canis familiaris; identical to SEQ ID NO: 10051
  misc_feature (1)..(1): n is a, c, g, or t

SEQ ID NO: 220159 - DNA, 688 bp, Canis familiaris; identical to SEQ ID NO: 10052

SEQ ID NO: 220160 - DNA, 598 bp, Canis familiaris; identical to SEQ ID NO: 10053

SEQ ID NO: 220161 - DNA, 675 bp, Canis familiaris; identical to SEQ ID NO: 10054
  misc_feature (213)..(213): n is a, c, g, or t

SEQ ID NO: 220162 - DNA, 503 bp, Canis familiaris; identical to SEQ ID NO: 10055

SEQ ID NO: 220163 - DNA, 628 bp, Canis familiaris; identical to SEQ ID NO: 10056

SEQ ID NO: 220164 - DNA, 617 bp, Canis familiaris; identical to SEQ ID NO: 10057

SEQ ID NO: 220165 - DNA, 522 bp, Canis familiaris; identical to SEQ ID NO: 10058

SEQ ID NO: 220166 - DNA, 239 bp, Canis familiaris; identical to SEQ ID NO: 10059

SEQ ID NO: 220167 - DNA, 506 bp, Canis familiaris; identical to SEQ ID NO: 10060

SEQ ID NO: 220168 - DNA, 556 bp, Canis familiaris; identical to SEQ ID NO: 10061
  misc_feature (1)..(1): n is a, c, g, or t
  misc_feature (130)..(130): n is a, c, g, or t

SEQ ID NO: 220169 - DNA, 570 bp, Canis familiaris; identical to SEQ ID NO: 10062

SEQ ID NO: 220170 - DNA, 518 bp, Canis familiaris; identical to SEQ ID NO: 10063

SEQ ID NO: 220171 - DNA, 690 bp, Canis familiaris; identical to SEQ ID NO: 10064

SEQ ID NO: 220172 - DNA, 671 bp, Canis familiaris; identical to SEQ ID NO: 10065

SEQ ID NO: 220173 - DNA, 576 bp, Canis familiaris; identical to SEQ ID NO: 10066

SEQ ID NO: 220174 - DNA, 649 bp, Canis familiaris; identical to SEQ ID NO: 10067

SEQ ID NO: 220175 - DNA, 729 bp, Canis familiaris; identical to SEQ ID NO: 10068
  misc_feature (321)..(321): n is a, c, g, or t

SEQ ID NO: 220176 - DNA, 634 bp, Canis familiaris; identical to SEQ ID NO: 10069

SEQ ID NO: 220177 - DNA, 621 bp, Canis familiaris; identical to SEQ ID NO: 10070

SEQ ID NO: 220178 - DNA, 528 bp, Canis familiaris; identical to SEQ ID NO: 10071

SEQ ID NO: 220179 - DNA, 664 bp, Canis familiaris; identical to SEQ ID NO: 10072
  misc_feature (381)..(381): n is a, c, g, or t

SEQ ID NO: 220180 - DNA, 572 bp, Canis familiaris; identical to SEQ ID NO: 10073

SEQ ID NO: 220181 - DNA, 617 bp, Canis familiaris; identical to SEQ ID NO: 10074

SEQ ID NO: 220182 - DNA, 652 bp, Canis familiaris; identical to SEQ ID NO: 10075
  misc_feature (184)..(184): n is a, c, g, or t
  misc_feature (186)..(186): n is a, c, g, or t

SEQ ID NO: 220183 - DNA, 683 bp, Canis familiaris; identical to SEQ ID NO: 10076

SEQ ID NO: 220184 - DNA, 440 bp, Canis familiaris; identical to SEQ ID NO: 10077

SEQ ID NO: 220185 - DNA, 682 bp, Canis familiaris; identical to SEQ ID NO: 10078

SEQ ID NO: 220186 - DNA, 531 bp, Canis familiaris; identical to SEQ ID NO: 10079
  misc_feature (309)..(310): n is a, c, g, or t
  misc_feature (320)..(321): n is a, c, g, or t
  misc_feature (343)..(343): n is a, c, g, or t

SEQ ID NO: 220187 - DNA, 612 bp, Canis familiaris; identical to SEQ ID NO: 10080

SEQ ID NO: 220188 - DNA, 593 bp, Canis familiaris; identical to SEQ ID NO: 10081

SEQ ID NO: 220189 - DNA, 618 bp, Canis familiaris; identical to SEQ ID NO: 10082

SEQ ID NO: 220190 - DNA, 332 bp, Canis familiaris; identical to SEQ ID NO: 10083

SEQ ID NO: 220191 - DNA, 565 bp, Canis familiaris; identical to SEQ ID NO: 10084

SEQ ID NO: 220192 - DNA, 582 bp, Canis familiaris; identical to SEQ ID NO: 10085

SEQ ID NO: 220193 - DNA, 592 bp, Canis familiaris; identical to SEQ ID NO: 10086

SEQ ID NO: 220194 - DNA, 489 bp, Canis familiaris; identical to SEQ ID NO: 10087

SEQ ID NO: 220195 - DNA, 569 bp, Canis familiaris; identical to SEQ ID NO: 10088

SEQ ID NO: 220196 - DNA, 600 bp, Canis familiaris; identical to SEQ ID NO: 10089
  misc_feature (303)..(303): n is a, c, g, or t

SEQ ID NO: 220197 - DNA, 348 bp, Canis familiaris; identical to SEQ ID NO: 10090

SEQ ID NO: 220198 - DNA, 517 bp, Canis familiaris; identical to SEQ ID NO: 10091

SEQ ID NO: 220199 - DNA, 114 bp, Canis familiaris; identical to SEQ ID NO: 10092
  misc_feature (1)..(1): n is a, c, g, or t

SEQ ID NO: 220200 - DNA, 249 bp, Canis familiaris; identical to SEQ ID NO: 10093
  misc_feature (1)..(1): n is a, c, g, or t

SEQ ID NO: 220201 - DNA, 401 bp, Canis familiaris; identical to SEQ ID NO: 10094

SEQ ID NO: 220202 - DNA, 427 bp, Canis familiaris; identical to SEQ ID NO: 10095

SEQ ID NO: 220203 - DNA, 675 bp, Canis familiaris; identical to SEQ ID NO: 10096

SEQ ID NO: 220204 - DNA, 467 bp, Canis familiaris; identical to SEQ ID NO: 10097
  misc_feature (424)..(424): n is a, c, g, or t

SEQ ID NO: 220205 - DNA, 606 bp, Canis familiaris; identical to SEQ ID NO: 10098

SEQ ID NO: 220206 - DNA, 300 bp, Canis familiaris; identical to SEQ ID NO: 10099

SEQ ID NO: 220207 - DNA, 646 bp, Canis familiaris; identical to SEQ ID NO: 10100

SEQ ID NO: 220208 - DNA, 184 bp, Canis familiaris; identical to SEQ ID NO: 10101

SEQ ID NO: 220209 - DNA, 619 bp, Canis familiaris; identical to SEQ ID NO: 10102
  misc_feature (155)..(155): n is a, c, g, or t
  misc_feature (161)..(161): n is a, c, g, or t
  misc_feature (176)..(177): n is a, c, g, or t
  misc_feature (182)..(182): n is a, c, g, or t
  misc_feature (186)..(186): n is a, c, g, or t

SEQ ID NO: 220210 - DNA, 585 bp, Canis familiaris; identical to SEQ ID NO: 10103
  misc_feature (1)..(1): n is a, c, g, or t

SEQ ID NO: 220211 - DNA, 607 bp, Canis familiaris; identical to SEQ ID NO: 10104
  misc_feature (159)..(159): n is a, c, g, or t
  misc_feature (177)..(177): n is a, c, g, or t

SEQ ID NO: 220212 - DNA, 647 bp, Canis familiaris; identical to SEQ ID NO: 10105

SEQ ID NO: 220213 - DNA, 569 bp, Canis familiaris; identical to SEQ ID NO: 10106

SEQ ID NO: 220214 - DNA, 637 bp, Canis familiaris; identical to SEQ ID NO: 10107
  misc_feature (278)..(278): n is a, c, g, or t

SEQ ID NO: 220215 - DNA, 485 bp, Canis familiaris; identical to SEQ ID NO: 10108

SEQ ID NO: 220216 - DNA, 399 bp, Canis familiaris; identical to SEQ ID NO: 10109

SEQ ID NO: 220217 - DNA, 656 bp, Canis familiaris; identical to SEQ ID NO: 10110

SEQ ID NO: 220218 - DNA, 628 bp, Canis familiaris; identical to SEQ ID NO: 10111

SEQ ID NO: 220219 - DNA, 419 bp, Canis familiaris; identical to SEQ ID NO: 10112

SEQ ID NO: 220220 - DNA, 619 bp, Canis familiaris; identical to SEQ ID NO: 10113

SEQ ID NO: 220221 - DNA, 685 bp, Canis familiaris; identical to SEQ ID NO: 10114

SEQ ID NO: 220222 - DNA, 594 bp, Canis familiaris; identical to SEQ ID NO: 10115

SEQ ID NO: 220223 - DNA, 619 bp, Canis familiaris; identical to SEQ ID NO: 10116

SEQ ID NO: 220224 - DNA, 634 bp, Canis familiaris; identical to SEQ ID NO: 10117

SEQ ID NO: 220225 - DNA, 596 bp, Canis familiaris; identical to SEQ ID NO: 10118

SEQ ID NO: 220226 - DNA, 702 bp, Canis familiaris; identical to SEQ ID NO: 10119

SEQ ID NO: 220227 - DNA, 630 bp, Canis familiaris; identical to SEQ ID NO: 10120

SEQ ID NO: 220228 - DNA, 719 bp, Canis familiaris; identical to SEQ ID NO: 10121

SEQ ID NO: 220229 - DNA, 650 bp, Canis familiaris; identical to SEQ ID NO: 10122
  misc_feature (67)..(67): n is a, c, g, or t

SEQ ID NO: 220230 - DNA, 614 bp, Canis familiaris; identical to SEQ ID NO: 10123

SEQ ID NO: 220231 - DNA, 443 bp, Canis familiaris; identical to SEQ ID NO: 10124
  misc_feature (270)..(270): n is a, c, g, or t

SEQ ID NO: 220232 - DNA, 696 bp, Canis familiaris; identical to SEQ ID NO: 10125
  misc_feature (400)..(401): n is a, c, g, or t

SEQ ID NO: 220233 - DNA, 641 bp, Canis familiaris; identical to SEQ ID NO: 10126

SEQ ID NO: 220234 - DNA, 464 bp, Canis familiaris; identical to SEQ ID NO: 10127

SEQ ID NO: 220235 - DNA, 637 bp, Canis familiaris; identical to SEQ ID NO: 10128

SEQ ID NO: 220236 - DNA, 666 bp, Canis familiaris; identical to SEQ ID NO: 10129

SEQ ID NO: 220237 - DNA, 699 bp, Canis familiaris; identical to SEQ ID NO: 10130

SEQ ID NO: 220238 - DNA, 692 bp, Canis familiaris; identical to SEQ ID NO: 10131

SEQ ID NO: 220239 - DNA, 687 bp, Canis familiaris; identical to SEQ ID NO: 10132

SEQ ID NO: 220240 - DNA, 656 bp, Canis familiaris; identical to SEQ ID NO: 10133

SEQ ID NO: 220241 - DNA, 130 bp, Canis familiaris; identical to SEQ ID NO: 10134

SEQ ID NO: 220242 - DNA, 665 bp, Canis familiaris; identical to SEQ ID NO: 10135

SEQ ID NO: 220243 - DNA, 621 bp, Canis familiaris; identical to SEQ ID NO: 10136

SEQ ID NO: 220244 - DNA, 708 bp, Canis familiaris; identical to SEQ ID NO: 10137

SEQ ID NO: 220245 - DNA, 531 bp, Canis familiaris; identical to SEQ ID NO: 10138
  misc_feature (211)..(211): n is a, c, g, or t

SEQ ID NO: 220246 - DNA, 673 bp, Canis familiaris; identical to SEQ ID NO: 10139

SEQ ID NO: 220247 - DNA, 682 bp, Canis familiaris; identical to SEQ ID NO: 10140

SEQ ID NO: 220248 - DNA, 511 bp, Canis familiaris; identical to SEQ ID NO: 10141

SEQ ID NO: 220249 - DNA, 117 bp, Canis familiaris; identical to SEQ ID NO: 10142

SEQ ID NO: 220250 - DNA, 592 bp, Canis familiaris; identical to SEQ ID NO: 10143

SEQ ID NO: 220251 - DNA, 549 bp, Canis familiaris; identical to SEQ ID NO: 10144

SEQ ID NO: 220252 - DNA, 522 bp, Canis familiaris; identical to SEQ ID NO: 10145
  misc_feature (1)..(1): n is a, c, g, or t

SEQ ID NO: 220253 - DNA, 527 bp, Canis familiaris; identical to SEQ ID NO: 10146

SEQ ID NO: 220254 - DNA, 569 bp, Canis familiaris; identical to SEQ ID NO: 10147

SEQ ID NO: 220255 - DNA, 662 bp, Canis familiaris; identical to SEQ ID NO: 10148

SEQ ID NO: 220256 - DNA, 564 bp, Canis familiaris; identical to SEQ ID NO: 10149

SEQ ID NO: 220257 - DNA, 608 bp, Canis familiaris; identical to SEQ ID NO: 10150

SEQ ID NO: 220258 - DNA, 118 bp, Canis familiaris; identical to SEQ ID NO: 10151
  misc_feature (1)..(1): n is a, c, g, or t

SEQ ID NO: 220259 - DNA, 496 bp, Canis familiaris; identical to SEQ ID NO: 10152

SEQ ID NO: 220260 - DNA, 654 bp, Canis familiaris; identical to SEQ ID NO: 10153
  misc_feature (1)..(1): n is a, c, g, or t

SEQ ID NO: 220261 - DNA, 398 bp, Canis familiaris; identical to SEQ ID NO: 10154

SEQ ID NO: 220262 - DNA, 686 bp, Canis familiaris; identical to SEQ ID NO: 10155
  misc_feature (1)..(1): n is a, c, g, or t
  misc_feature (11)..(11): n is a, c, g, or t
  misc_feature (78)..(78): n is a, c, g, or t
  misc_feature (357)..(357): n is a, c, g, or t

SEQ ID NO: 220263 - DNA, 567 bp, Canis familiaris; identical to SEQ ID NO: 10156

SEQ ID NO: 220264 - DNA, 342 bp, Canis familiaris; identical to SEQ ID NO: 10157

SEQ ID NO: 220265 - DNA, 629 bp, Canis familiaris; identical to SEQ ID NO: 10158
  misc_feature (102)..(102): n is a, c, g, or t

SEQ ID NO: 220266 - DNA, 608 bp, Canis familiaris; identical to SEQ ID NO: 10159

SEQ ID NO: 220267 - DNA, 642 bp, Canis familiaris; identical to SEQ ID NO: 10160

SEQ ID NO: 220268 - DNA, 673 bp, Canis familiaris; identical to SEQ ID NO: 10161

SEQ ID NO: 220269 - DNA, 672 bp, Canis familiaris; identical to SEQ ID NO: 10162

SEQ ID NO: 220270 - DNA, 667 bp, Canis familiaris; identical to SEQ ID NO: 10163

SEQ ID NO: 220271 - DNA, 583 bp, Canis familiaris; identical to SEQ ID NO: 10164

SEQ ID NO: 220272 - DNA, 651 bp, Canis familiaris; identical to SEQ ID NO: 10165

SEQ ID NO: 220273 - DNA, 563 bp, Canis familiaris; identical to SEQ ID NO: 10166

SEQ ID NO: 220274 - DNA, 616 bp, Canis familiaris; identical to SEQ ID NO: 10167

SEQ ID NO: 220275 - DNA, 553 bp, Canis familiaris; identical to SEQ ID NO: 10168
  misc_feature (1)..(1): n is a, c, g, or t

SEQ ID NO: 220276 - DNA, 566 bp, Canis familiaris; identical to SEQ ID NO: 10169

SEQ ID NO: 220277 - DNA, 640 bp, Canis familiaris; identical to SEQ ID NO: 10170

SEQ ID NO: 220278 - DNA, 661 bp, Canis familiaris; identical to SEQ ID NO: 10171

SEQ ID NO: 220279 - DNA, 339 bp, Canis familiaris; identical to SEQ ID NO: 10172

SEQ ID NO: 220280 - DNA, 625 bp, Canis familiaris; identical to SEQ ID NO: 10173

SEQ ID NO: 220281 - DNA, 457 bp, Canis familiaris; identical to SEQ ID NO: 10174

SEQ ID NO: 220282 - DNA, 537 bp, Canis familiaris; identical to SEQ ID NO: 10175

SEQ ID NO: 220283 - DNA, 726 bp, Canis familiaris; identical to SEQ ID NO: 10176
  misc_feature (29)..(29): n is a, c, g, or t

SEQ ID NO: 220284 - DNA, 120 bp, Canis familiaris; identical to SEQ ID NO: 10177

SEQ ID NO: 220285 - DNA, 624 bp, Canis familiaris; identical to SEQ ID NO: 10178

SEQ ID NO: 220286 - DNA, 604 bp, Canis familiaris; identical to SEQ ID NO: 10179

SEQ ID NO: 220287 - DNA, 405 bp, Canis familiaris; identical to SEQ ID NO: 10180
  misc_feature (257)..(258): n is a, c, g, or t
  misc_feature (282)..(283): n is a, c, g, or t

SEQ ID NO: 220288 - DNA, 520 bp, Canis familiaris; identical to SEQ ID NO: 10181

SEQ ID NO: 220289 - DNA, 343 bp, Canis familiaris; identical to SEQ ID NO: 10182

SEQ ID NO: 220290 - DNA, 665 bp, Canis familiaris; identical to SEQ ID NO: 10183

SEQ ID NO: 220291 - DNA, 692 bp, Canis familiaris; identical to SEQ ID NO: 10184

SEQ ID NO: 220292 - DNA, 610 bp, Canis familiaris; identical to SEQ ID NO: 10185
  misc_feature (454)..(454): n is a, c, g, or t

SEQ ID NO: 220293 - DNA, 599 bp, Canis familiaris; identical to SEQ ID NO: 10186

SEQ ID NO: 220294 - DNA, 645 bp, Canis familiaris; identical to SEQ ID NO: 10187

SEQ ID NO: 220295 - DNA, 661 bp, Canis familiaris; identical to SEQ ID NO: 10188
  misc_feature (473)..(475): n is a, c, g, or t
  misc_feature (506)..(506): n is a, c, g, or t
  misc_feature (580)..(580): n is a, c, g, or t

SEQ ID NO: 220296 - DNA, 604 bp, Canis familiaris; identical to SEQ ID NO: 10189

SEQ ID NO: 220297 - DNA, 692 bp, Canis familiaris; identical to SEQ ID NO: 10190
  misc_feature (1)..(1): n is a, c, g, or t

SEQ ID NO: 220298 - DNA, 620 bp, Canis familiaris; identical to SEQ ID NO: 10191

SEQ ID NO: 220299 - DNA, 521 bp, Canis familiaris; identical to SEQ ID NO: 10192

SEQ ID NO: 220300 - DNA, 528 bp, Canis familiaris; identical to SEQ ID NO: 10193

SEQ ID NO: 220301 - DNA, 426 bp, Canis familiaris; identical to SEQ ID NO: 10194

SEQ ID NO: 220302 - DNA, 682 bp, Canis familiaris; identical to SEQ ID NO: 10195
  misc_feature (577)..(577): n is a, c, g, or t

SEQ ID NO: 220303 - DNA, 414 bp, Canis familiaris; identical to SEQ ID NO: 10196
  misc_feature (1)..(1): n is a, c, g, or t

SEQ ID NO: 220304 - DNA, 318 bp, Canis familiaris; identical to SEQ ID NO: 10197

SEQ ID NO: 220305 - DNA, 735 bp, Canis familiaris; identical to SEQ ID NO: 10198
  misc_feature (87)..(87): n is a, c, g, or t

SEQ ID NO: 220306 - DNA, 271 bp, Canis familiaris; identical to SEQ ID NO: 10199

SEQ ID NO: 220307 - DNA, 605 bp, Canis familiaris; identical to SEQ ID NO: 10200

SEQ ID NO: 220308 - DNA, 561 bp, Canis familiaris; identical to SEQ ID NO: 10201

SEQ ID NO: 220309 - DNA, 298 bp, Canis familiaris; identical to SEQ ID NO: 10202
  misc_feature (1)..(1): n is a, c, g, or t

SEQ ID NO: 220310 - DNA, 532 bp, Canis familiaris; identical to SEQ ID NO: 10203

SEQ ID NO: 220311 - DNA, 588 bp, Canis familiaris; identical to SEQ ID NO: 10204

SEQ ID NO: 220312 - DNA, 574 bp, Canis familiaris; identical to SEQ ID NO: 10205

SEQ ID NO: 220313 - DNA, 528 bp, Canis familiaris; identical to SEQ ID NO: 10206

SEQ ID NO: 220314 - DNA, 624 bp, Canis familiaris; identical to SEQ ID NO: 10207
  misc_feature (180)..(180): n is a, c, g, or t

SEQ ID NO: 220315 - DNA, 567 bp, Canis familiaris; identical to SEQ ID NO: 10208

SEQ ID NO: 220316 - DNA, 335 bp, Canis familiaris; identical to SEQ ID NO: 10209
  misc_feature (268)..(268): n is a, c, g, or t

SEQ ID NO: 220317 - DNA, 330 bp, Canis familiaris; identical to SEQ ID NO: 10210

SEQ ID NO: 220318 - DNA, 492 bp, Canis familiaris; identical to SEQ ID NO: 10211

SEQ ID NO: 220319 - DNA, 563 bp, Canis familiaris; identical to SEQ ID NO: 10212

SEQ ID NO: 220320 - DNA, 107 bp, Canis familiaris; identical to SEQ ID NO: 10213

SEQ ID NO: 220321 - DNA, 433 bp, Canis familiaris; identical to SEQ ID NO: 10214

SEQ ID NO: 220322 - DNA, 449 bp, Canis familiaris; identical to SEQ ID NO: 10215

SEQ ID NO: 220323 - DNA, 599 bp, Canis familiaris; identical to SEQ ID NO: 10216

SEQ ID NO: 220324 - DNA, 618 bp, Canis familiaris; identical to SEQ ID NO: 10217

SEQ ID NO: 220325 - DNA, 376 bp, Canis familiaris; identical to SEQ ID NO: 10218

SEQ ID NO: 220326 - DNA, 593 bp, Canis familiaris; identical to SEQ ID NO: 10219

SEQ ID NO: 220327 - DNA, 526 bp, Canis familiaris; identical to SEQ ID NO: 10220

SEQ ID NO: 220328 - DNA, 378 bp, Canis familiaris; identical to SEQ ID NO: 10221

SEQ ID NO: 220329 - DNA, 640 bp, Canis familiaris; identical to SEQ ID NO: 10222
  misc_feature (163)..(163): n is a, c, g, or t

SEQ ID NO: 220330 - DNA, 616 bp, Canis familiaris; identical to SEQ ID NO: 10223

SEQ ID NO: 220331 - DNA, 588 bp, Canis familiaris; identical to SEQ ID NO: 10224

SEQ ID NO: 220332 - DNA, 623 bp, Canis familiaris; identical to SEQ ID NO: 10225

SEQ ID NO: 220333 - DNA, 610 bp, Canis familiaris; identical to SEQ ID NO: 10226

SEQ ID NO: 220334 - DNA, 751 bp, Canis familiaris; identical to SEQ ID NO: 10227

SEQ ID NO: 220335 - DNA, 494 bp, Canis familiaris; identical to SEQ ID NO: 10228

SEQ ID NO: 220336 - DNA, 560 bp, Canis familiaris; identical to SEQ ID NO: 10229

SEQ ID NO: 220337 - DNA, 536 bp, Canis familiaris; identical to SEQ ID NO: 10230

SEQ ID NO: 220338 - DNA, 542 bp, Canis familiaris; identical to SEQ ID NO: 10231

SEQ ID NO: 220339 - DNA, 620 bp, Canis familiaris; identical to SEQ ID NO: 10232

SEQ ID NO: 220340 - DNA, 574 bp, Canis familiaris; identical to SEQ ID NO: 10233

SEQ ID NO: 220341 - DNA, 333 bp, Canis familiaris; identical to SEQ ID NO: 10234

SEQ ID NO: 220342 - DNA, 565 bp, Canis familiaris; identical to SEQ ID NO: 10235

SEQ ID NO: 220343 - DNA, 102 bp, Canis familiaris; identical to SEQ ID NO: 10236

SEQ ID NO: 220344 - DNA, 656 bp, Canis familiaris; identical to SEQ ID NO: 10237

SEQ ID NO: 220345 - DNA, 638 bp, Canis familiaris; identical to SEQ ID NO: 10238

SEQ ID NO: 220346 - DNA, 710 bp, Canis familiaris; identical to SEQ ID NO: 10239

SEQ ID NO: 220347 - DNA, 581 bp, Canis familiaris; identical to SEQ ID NO: 10240

SEQ ID NO: 220348 - DNA, 603 bp, Canis familiaris; identical to SEQ ID NO: 10241

SEQ ID NO: 220349 - DNA, 530 bp, Canis familiaris; identical to SEQ ID NO: 10242

SEQ ID NO: 220350 - DNA, 665 bp, Canis familiaris; identical to SEQ ID NO: 10243

SEQ ID NO: 220351 - DNA, 519 bp, Canis familiaris; identical to SEQ ID NO: 10244
  misc_feature (1)..(1): n is a, c, g, or t

SEQ ID NO: 220352 - DNA, 425 bp, Canis familiaris; identical to SEQ ID NO: 10245

SEQ ID NO: 220353 - DNA, 135 bp, Canis familiaris; identical to SEQ ID NO: 10246

SEQ ID NO: 220354 - DNA, 622 bp, Canis familiaris; identical to SEQ ID NO: 10247

SEQ ID NO: 220355 - DNA, 601 bp, Canis familiaris; identical to SEQ ID NO: 10248

SEQ ID NO: 220356 - DNA, 550 bp, Canis familiaris; identical to SEQ ID NO: 10249

SEQ ID NO: 220357 - DNA, 535 bp, Canis familiaris; identical to SEQ ID NO: 10250
  misc_feature (1)..(1): n is a, c, g, or t

SEQ ID NO: 220358 - DNA, 574 bp, Canis familiaris; identical to SEQ ID NO: 10251
  misc_feature (1)..(1): n is a, c, g, or t

SEQ ID NO: 220359 - DNA, 629 bp, Canis familiaris; identical to SEQ ID NO: 10252

SEQ ID NO: 220360 - DNA, 657 bp, Canis familiaris; identical to SEQ ID NO: 10253

SEQ ID NO: 220361 - DNA, 710 bp, Canis familiaris; identical to SEQ ID NO: 10254

SEQ ID NO: 220362 - DNA, 538 bp, Canis familiaris; identical to SEQ ID NO: 10255

SEQ ID NO: 220363 - DNA, 513 bp, Canis familiaris; identical to SEQ ID NO: 10256

SEQ ID NO: 220364 - DNA, 625 bp, Canis familiaris; identical to SEQ ID NO: 10257

SEQ ID NO: 220365 - DNA, 614 bp, Canis familiaris; identical to SEQ ID NO: 10258

SEQ ID NO: 220366 - DNA, 167 bp, Canis familiaris; identical to SEQ ID NO: 10259
  misc_feature (1)..(1): n is a, c, g, or t

SEQ ID NO: 220367 - DNA, 626 bp, Canis familiaris; identical to SEQ ID NO: 10260
  misc_feature (1)..(1): n is a, c, g, or t

SEQ ID NO: 220368 - DNA, 501 bp, Canis familiaris; identical to SEQ ID NO: 10261
  misc_feature (1)..(1): n is a, c, g, or t

SEQ ID NO: 220369 - DNA, 604 bp, Canis familiaris; identical to SEQ ID NO: 10262

SEQ ID NO: 220370 - DNA, 310 bp, Canis familiaris; identical to SEQ ID NO: 10263

SEQ ID NO: 220371 - DNA, 635 bp, Canis familiaris; identical to SEQ ID NO: 10264

SEQ ID NO: 220372 - DNA, 645 bp, Canis familiaris; identical to SEQ ID NO: 10265

SEQ ID NO: 220373 - DNA, 657 bp, Canis familiaris; identical to SEQ ID NO: 10266
  misc_feature (437)..(438): n is a, c, g, or t

SEQ ID NO: 220374 - DNA, 576 bp, Canis familiaris; identical to SEQ ID NO: 10267
  misc_feature (1)..(1): n is a, c, g, or t

SEQ ID NO: 220375 - DNA, 589 bp, Canis familiaris; identical to SEQ ID NO: 10268

SEQ ID NO: 220376 - DNA, 106 bp, Canis familiaris; identical to SEQ ID NO: 10269

SEQ ID NO: 220377 - DNA, 652 bp, Canis familiaris; identical to SEQ ID NO: 10270

SEQ ID NO: 220378 - DNA, 412 bp, Canis familiaris; identical to SEQ ID NO: 10271

SEQ ID NO: 220379 - DNA, 654 bp, Canis familiaris; identical to SEQ ID NO: 10272

SEQ ID NO: 220380 - DNA, 393 bp, Canis familiaris; identical to SEQ ID NO: 10273

SEQ ID NO: 220381 - DNA, 616 bp, Canis familiaris; identical to SEQ ID NO: 10274
  misc_feature (1)..(1): n is a, c, g, or t
  misc_feature (507)..(507): n is a, c, g, or t

SEQ ID NO: 220382 - DNA, 129 bp, Canis familiaris; identical to SEQ ID NO: 10275

SEQ ID NO: 220383 - DNA, 292 bp, Canis familiaris; identical to SEQ ID NO: 10276

SEQ ID NO: 220384 - DNA, 703 bp, Canis familiaris; identical to SEQ ID NO: 10277

SEQ ID NO: 220385 - DNA, 583 bp, Canis familiaris; identical to SEQ ID NO: 10278

SEQ ID NO: 220386 - DNA, 420 bp, Canis familiaris; identical to SEQ ID NO: 10279

SEQ ID NO: 220387 - DNA, 421 bp, Canis familiaris; identical to SEQ ID NO: 10280

SEQ ID NO: 220388 - DNA, 654 bp, Canis familiaris; identical to SEQ ID NO: 10281

SEQ ID NO: 220389 - DNA, 669 bp, Canis familiaris; identical to SEQ ID NO: 10282

SEQ ID NO: 220390 - DNA, 388 bp, Canis familiaris; identical to SEQ ID NO: 10283

SEQ ID NO: 220391 - DNA, 602 bp, Canis familiaris; identical to SEQ ID NO: 10284

SEQ ID NO: 220392 - DNA, 724 bp, Canis familiaris; identical to SEQ ID NO: 10285

SEQ ID NO: 220393 - DNA, 621 bp, Canis familiaris; identical to SEQ ID NO: 10286

SEQ ID NO: 220394 - DNA, 579 bp, Canis familiaris; identical to SEQ ID NO: 10287

SEQ ID NO: 220395 - DNA, 226 bp, Canis familiaris; identical to SEQ ID NO: 10288

SEQ ID NO: 220396 - DNA, 159 bp, Canis familiaris; identical to SEQ ID NO: 10289

SEQ ID NO: 220397 - DNA, 595 bp, Canis familiaris; identical to SEQ ID NO: 10290

SEQ ID NO: 220398 - DNA, 617 bp, Canis familiaris; identical to SEQ ID NO: 10291

SEQ ID NO: 220399 - DNA, 461 bp, Canis familiaris; identical to SEQ ID NO: 10292

SEQ ID NO: 220400 - DNA, 555 bp, Canis familiaris; identical to SEQ ID NO: 10293

SEQ ID NO: 220401 - DNA, 663 bp, Canis familiaris; identical to SEQ ID NO: 10294
  misc_feature (1)..(1): n is a, c, g, or t

SEQ ID NO: 220402 - DNA, 595 bp, Canis familiaris; identical to SEQ ID NO: 10295

SEQ ID NO: 220403 - DNA, 639 bp, Canis familiaris; identical to SEQ ID NO: 10296

SEQ ID NO: 220404 - DNA, 586 bp, Canis familiaris; identical to SEQ ID NO: 10297
  misc_feature (43)..(43): n is a, c, g, or t

SEQ ID NO: 220405 - DNA, 648 bp, Canis familiaris; identical to SEQ ID NO: 10298

SEQ ID NO: 220406 - DNA, 604 bp, Canis familiaris; identical to SEQ ID NO: 10299

SEQ ID NO: 220407 - DNA, 535 bp, Canis familiaris; identical to SEQ ID NO: 10300

SEQ ID NO: 220408 - DNA, 236 bp, Canis familiaris; identical to SEQ ID NO: 10301

SEQ ID NO: 220409 - DNA, 687 bp, Canis familiaris; identical to SEQ ID NO: 10302
  misc_feature (277)..(277): n is a, c, g, or t

SEQ ID NO: 220410 - DNA, 434 bp, Canis familiaris; identical to SEQ ID NO: 10303

SEQ ID NO: 220411 - DNA, 108 bp, Canis familiaris; identical to SEQ ID NO: 10304

SEQ ID NO: 220412 - DNA, 188 bp, Canis familiaris; identical to SEQ ID NO: 10305

SEQ ID NO: 220413 - DNA, 600 bp, Canis familiaris; identical to SEQ ID NO: 10306

SEQ ID NO: 220414 - DNA, 551 bp, Canis familiaris; identical to SEQ ID NO: 10307

SEQ ID NO: 220415 - DNA, 588 bp, Canis familiaris; identical to SEQ ID NO: 10308

SEQ ID NO: 220416 - DNA, 539 bp, Canis familiaris; identical to SEQ ID NO: 10309

SEQ ID NO: 220417 - DNA, 231 bp, Canis familiaris; identical to SEQ ID NO: 10310

SEQ ID NO: 220418 - DNA, 547 bp, Canis familiaris; identical to SEQ ID NO: 10311
  misc_feature (1)..(1): n is a, c, g, or t

SEQ ID NO: 220419 - DNA, 509 bp, Canis familiaris; identical to SEQ ID NO: 10312

SEQ ID NO: 220420 - DNA, 583 bp, Canis familiaris; identical to SEQ ID NO: 10313

SEQ ID NO: 220421 - DNA, 232 bp, Canis familiaris; identical to SEQ ID NO: 10314

SEQ ID NO: 220422 - DNA, 122 bp, Canis familiaris; identical to SEQ ID NO: 10315

SEQ ID NO: 220423 - DNA, 555 bp, Canis familiaris; identical to SEQ ID NO: 10316
  misc_feature (46)..(46): n is a, c, g, or t
  misc_feature (56)..(56): n is a, c, g, or t
  misc_feature (67)..(67): n is a, c, g, or t
  misc_feature (90)..(91): n is a, c, g, or t
  misc_feature (106)..(107): n is a, c, g, or t
  misc_feature (122)..(122): n is a, c, g, or t
  misc_feature (152)..(152): n is a, c, g, or t
  misc_feature (174)..(176): n is a, c, g, or t
  misc_feature (182)..(183): n is a, c, g, or t
  misc_feature (198)..(198): n is a, c, g, or t
  misc_feature (287)..(287): n is a, c, g, or t

SEQ ID NO: 220424 - DNA, 460 bp, Canis familiaris; identical to SEQ ID NO: 10317

SEQ ID NO: 220425 - DNA, 371 bp, Canis familiaris; identical to SEQ ID NO: 10318

SEQ ID NO: 220426 - DNA, 470 bp, Canis familiaris; identical to SEQ ID NO: 10319
  misc_feature (235)..(235): n is a, c, g, or t

SEQ ID NO: 220427 - DNA, 516 bp, Canis familiaris; identical to SEQ ID NO: 10320

SEQ ID NO: 220428 - DNA, 639 bp, Canis familiaris; identical to SEQ ID NO: 10321
  misc_feature (503)..(503): n is a, c, g, or t
  misc_feature (511)..(511): n is a, c, g, or t

SEQ ID NO: 220429 - DNA, 188 bp, Canis familiaris; identical to SEQ ID NO: 10322

SEQ ID NO: 220430 - DNA, 618 bp, Canis familiaris; identical to SEQ ID NO: 10323

SEQ ID NO: 220431 - DNA, 162 bp, Canis familiaris; identical to SEQ ID NO: 10324

SEQ ID NO: 220432 - DNA, 437 bp, Canis familiaris; identical to SEQ ID NO: 10325

SEQ ID NO: 220433 - DNA, 223 bp, Canis familiaris; identical to SEQ ID NO: 10326

SEQ ID NO: 220434 - DNA, 619 bp, Canis familiaris; identical to SEQ ID NO: 10327

SEQ ID NO: 220435 - DNA, 558 bp, Canis familiaris; identical to SEQ ID NO: 10328

SEQ ID NO: 220436 - DNA, 674 bp, Canis familiaris; identical to SEQ ID NO: 10329

SEQ ID NO: 220437 - DNA, 531 bp, Canis familiaris; identical to SEQ ID NO: 10330

SEQ ID NO: 220438 - DNA, 350 bp, Canis familiaris; identical to SEQ ID NO: 10331

SEQ ID NO: 220439 - DNA, 633 bp, Canis familiaris; identical to SEQ ID NO: 10332

SEQ ID NO: 220440 - DNA, 102 bp, Canis familiaris; identical to SEQ ID NO: 10333

SEQ ID NO: 220441 - DNA, 640 bp, Canis familiaris; identical to SEQ ID NO: 10334

SEQ ID NO: 220442 - DNA, 587 bp, Canis familiaris; identical to SEQ ID NO: 10335

SEQ ID NO: 220443 - DNA, 615 bp, Canis familiaris; identical to SEQ ID NO: 10336

SEQ ID NO: 220444 - DNA, 480 bp, Canis familiaris; identical to SEQ ID NO: 10337

SEQ ID NO: 220445 - DNA, 571 bp, Canis familiaris; identical to SEQ ID NO: 10338

SEQ ID NO: 220446 - DNA, 469 bp, Canis familiaris; identical to SEQ ID NO: 10339

SEQ ID NO: 220447 - DNA, 408 bp, Canis familiaris; identical to SEQ ID NO: 10340

SEQ ID NO: 220448 - DNA, 522 bp, Canis familiaris; identical to SEQ ID NO: 10341

SEQ ID NO: 220449 - DNA, 495 bp, Canis familiaris; identical to SEQ ID NO: 10342

SEQ ID NO: 220450 - DNA, 671 bp, Canis familiaris; identical to SEQ ID NO: 10343
  misc_feature (545)..(545): n is a, c, g, or t

SEQ ID NO: 220451 - DNA, 649 bp, Canis familiaris; identical to SEQ ID NO: 10344

SEQ ID NO: 220452 - DNA, 662 bp, Canis familiaris; identical to SEQ ID NO: 10345

SEQ ID NO: 220453 - DNA, 646 bp, Canis familiaris; identical to SEQ ID NO: 10346

SEQ ID NO: 220454 - DNA, 389 bp, Canis familiaris; identical to SEQ ID NO: 10347

SEQ ID NO: 220455 - DNA, 621 bp, Canis familiaris; identical to SEQ ID NO: 10348

SEQ ID NO: 220456 - DNA, 610 bp, Canis familiaris; identical to SEQ ID NO: 10349

SEQ ID NO: 220457 - DNA, 703 bp, Canis familiaris; identical to SEQ ID NO: 10350
  misc_feature (354)..(354): n is a, c, g, or t

SEQ ID NO: 220458 - DNA, 633 bp, Canis familiaris; identical to SEQ ID NO: 10351

SEQ ID NO: 220459 - DNA, 733 bp, Canis familiaris; identical to SEQ ID NO: 10352
  misc_feature (179)..(180): n is a, c, g, or t
  misc_feature (248)..(249): n is a, c, g, or t
  misc_feature (298)..(299): n is a, c, g, or t
  misc_feature (329)..(331): n is a, c, g, or t
  misc_feature (361)..(362): n is a, c, g, or t
  misc_feature (381)..(382): n is a, c, g, or t
  misc_feature (397)..(398): n is a, c, g, or t
  misc_feature (427)..(428): n is a, c, g, or t
  misc_feature (455)..(455): n is a, c, g, or t
  misc_feature (482)..(482): n is a, c, g, or t
  misc_feature (497)..(497): n is a, c, g, or t
  misc_feature (515)..(515): n is a, c, g, or t
  misc_feature (530)..(530): n is a, c, g, or t
  misc_feature (548)..(548): n is a, c, g, or t

SEQ ID NO: 220460 - DNA, 418 bp, Canis familiaris; identical to SEQ ID NO: 10353

SEQ ID NO: 220461 - DNA, 573 bp, Canis familiaris; identical to SEQ ID NO: 10354

SEQ ID NO: 220462 - DNA, 342 bp, Canis familiaris; identical to SEQ ID NO: 10355

SEQ ID NO: 220463 - DNA, 499 bp, Canis familiaris; identical to SEQ ID NO: 10356
  misc_feature (114)..(114): n is a, c, g, or t

SEQ ID NO: 220464 - DNA, 648 bp, Canis familiaris; identical to SEQ ID NO: 10357
  misc_feature (162)..(162): n is a, c, g, or t
  misc_feature (192)..(192): n is a, c, g, or t
  misc_feature (219)..(219): n is a, c, g, or t
  misc_feature (258)..(258): n is a, c, g, or t
  misc_feature (278)..(278): n is a, c, g, or t
  misc_feature (300)..(300): n is a, c, g, or t
  misc_feature (314)..(315): n is a, c, g, or t
  misc_feature (327)..(327): n is a, c, g, or t
  misc_feature (339)..(340): n is a, c, g, or t
  misc_feature (351)..(352): n is a, c, g, or t
  misc_feature (365)..(366): n is a, c, g, or t
  misc_feature (376)..(377): n is a, c, g, or t
  misc_feature (389)..(390): n is a, c, g, or t

SEQ ID NO: 220465 - DNA, 188 bp, Canis familiaris; identical to SEQ ID NO: 10358

SEQ ID NO: 220466 - DNA, 596 bp, Canis familiaris; identical to SEQ ID NO: 10359
  misc_feature (1)..(1): n is a, c, g, or t

SEQ ID NO: 220467 - DNA, 473 bp, Canis familiaris; identical to SEQ ID NO: 10360

SEQ ID NO: 220468 - DNA, 629 bp, Canis familiaris; identical to SEQ ID NO: 10361

SEQ ID NO: 220469 - DNA, 522 bp, Canis familiaris; identical to SEQ ID NO: 10362

SEQ ID NO: 220470 - DNA, 608 bp, Canis familiaris; identical to SEQ ID NO: 10363

SEQ ID NO: 220471 - DNA, 518 bp, Canis familiaris; identical to SEQ ID NO: 10364

SEQ ID NO: 220472 - DNA, 597 bp, Canis familiaris; identical to SEQ ID NO: 10365

SEQ ID NO: 220473 - DNA, 662 bp, Canis familiaris; identical to SEQ ID NO: 10366

SEQ ID NO: 220474 - DNA, 657 bp, Canis familiaris; identical to SEQ ID NO: 10367

SEQ ID NO: 220475 - DNA, 396 bp, Canis familiaris; identical to SEQ ID NO: 10368

SEQ ID NO: 220476 - DNA, 580 bp, Canis familiaris; identical to SEQ ID NO: 10369

SEQ ID NO: 220477 - DNA, 636 bp, Canis familiaris; identical to SEQ ID NO: 10370

SEQ ID NO: 220478 - DNA, 398 bp, Canis familiaris; identical to SEQ ID NO: 10371

SEQ ID NO: 220479 - DNA, 538 bp, Canis familiaris; identical to SEQ ID NO: 10372

SEQ ID NO: 220480 - DNA, 280 bp, Canis familiaris; identical to SEQ ID NO: 10373
  misc_feature (64)..(64): n is a, c, g, or t

SEQ ID NO: 220481 - DNA, 146 bp, Canis familiaris; identical to SEQ ID NO: 10374

SEQ ID NO: 220482 - DNA, 539 bp, Canis familiaris; identical to SEQ ID NO: 10375

SEQ ID NO: 220483 - DNA, 681 bp, Canis familiaris; identical to SEQ ID NO: 10376

SEQ ID NO: 220484 - DNA, 393 bp, Canis familiaris; identical to SEQ ID NO: 10377
  misc_feature (1)..(1): n is a, c, g, or t

SEQ ID NO: 220485 - DNA, 602 bp, Canis familiaris; identical to SEQ ID NO: 10378

SEQ ID NO: 220486 - DNA, 423 bp, Canis familiaris; identical to SEQ ID NO: 10379

SEQ ID NO: 220487 - DNA, 259 bp, Canis familiaris; identical to SEQ ID NO: 10380
  misc_feature (1)..(1): n is a, c, g, or t

SEQ ID NO: 220488 - DNA, 562 bp, Canis familiaris; identical to SEQ ID NO: 10381

SEQ ID NO: 220489 - DNA, 652 bp, Canis familiaris; identical to SEQ ID NO: 10382

SEQ ID NO: 220490 - DNA, 626 bp, Canis familiaris; identical to SEQ ID NO: 10383

SEQ ID NO: 220491 - DNA, 598 bp, Canis familiaris; identical to SEQ ID NO: 10384

SEQ ID NO: 220492 - DNA, 652 bp, Canis familiaris; identical to SEQ ID NO: 10385
  misc_feature (239)..(239): n is a, c, g, or t

SEQ ID NO: 220493 - DNA, 665 bp, Canis familiaris; identical to SEQ ID NO: 10386
  misc_feature (1)..(1): n is a, c, g, or t

SEQ ID NO: 220494 - DNA, 247 bp, Canis familiaris; identical to SEQ ID NO: 10387
  misc_feature (1)..(1): n is a, c, g, or t

SEQ ID NO: 220495 - DNA, 605 bp, Canis familiaris; identical to SEQ ID NO: 10388

SEQ ID NO: 220496 - DNA, 498 bp, Canis familiaris; identical to SEQ ID NO: 10389

SEQ ID NO: 220497 - DNA, 678 bp, Canis familiaris; identical to SEQ ID NO: 10390

SEQ ID NO: 220498 - DNA, 574 bp, Canis familiaris; identical to SEQ ID NO: 10391

SEQ ID NO: 220499 - DNA, 527 bp, Canis familiaris; identical to SEQ ID NO: 10392

SEQ ID NO: 220500 - DNA, 173 bp, Canis familiaris; identical to SEQ ID NO: 10393

SEQ ID NO: 220501 - DNA, 519 bp, Canis familiaris; identical to SEQ ID NO: 10394
  misc_feature (456)..(456): n is a, c, g, or t

SEQ ID NO: 220502 - DNA, 684 bp, Canis familiaris; identical to SEQ ID NO: 10395
  misc_feature (382)..(382): n is a, c, g, or t

SEQ ID NO: 220503 - DNA, 675 bp, Canis familiaris; identical to SEQ ID NO: 10396

SEQ ID NO: 220504 - DNA, 726 bp, Canis familiaris; identical to SEQ ID NO: 10397

SEQ ID NO: 220505 - DNA, 701 bp, Canis familiaris; identical to SEQ ID NO: 10398

SEQ ID NO: 220506 - DNA, 118 bp, Canis familiaris; identical to SEQ ID NO: 10399

SEQ ID NO: 220507 - DNA, 664 bp, Canis familiaris; identical to SEQ ID NO: 10400

SEQ ID NO: 220508 - DNA, 677 bp, Canis familiaris; identical to SEQ ID NO: 10401

SEQ ID NO: 220509 - DNA, 380 bp, Canis familiaris; identical to SEQ ID NO: 10402

SEQ ID NO: 220510 - DNA, 533 bp, Canis familiaris; identical to SEQ ID NO: 10403

SEQ ID NO: 220511 - DNA, 611 bp, Canis familiaris; identical to SEQ ID NO: 10404

SEQ ID NO: 220512 - DNA, 526 bp, Canis familiaris; identical to SEQ ID NO: 10405

SEQ ID NO: 220513 - DNA, 609 bp, Canis familiaris; identical to SEQ ID NO: 10406

SEQ ID NO: 220514 - DNA, 718 bp, Canis familiaris; identical to SEQ ID NO: 10407

SEQ ID NO: 220515 - DNA, 619 bp, Canis familiaris; identical to SEQ ID NO: 10408

SEQ ID NO: 220516 - DNA, 645 bp, Canis familiaris; identical to SEQ ID NO: 10409

SEQ ID NO: 220517 - DNA, 687 bp, Canis familiaris; identical to SEQ ID NO: 10410
  misc_feature (196)..(196): n is a, c, g, or t

SEQ ID NO: 220518 - DNA, 105 bp, Canis familiaris; identical to SEQ ID NO: 10411

SEQ ID NO: 220519 - DNA, 655 bp, Canis familiaris; identical to SEQ ID NO: 10412

SEQ ID NO: 220520 - DNA, 628 bp, Canis familiaris; identical to SEQ ID NO: 10413

SEQ ID NO: 220521 - DNA, 618 bp, Canis familiaris; identical to SEQ ID NO: 10414

SEQ ID NO: 220522 - DNA, 623 bp, Canis familiaris; identical to SEQ ID NO: 10415

SEQ ID NO: 220523 - DNA, 597 bp, Canis familiaris; identical to SEQ ID NO: 10416

SEQ ID NO: 220524 - DNA, 566 bp, Canis familiaris; identical to SEQ ID NO: 10417

SEQ ID NO: 220525 - DNA, 278 bp, Canis familiaris; identical to SEQ ID NO: 10418
  misc_feature (143)..(143): n is a, c, g, or t
  misc_feature (146)..(146): n is a, c, g, or t

SEQ ID NO: 220526 - DNA, 471 bp, Canis familiaris; identical to SEQ ID NO: 10419

SEQ ID NO: 220527 - DNA, 545 bp, Canis familiaris; identical to SEQ ID NO: 10420

SEQ ID NO: 220528 - DNA, 429 bp, Canis familiaris; identical to SEQ ID NO: 10421

SEQ ID NO: 220529 - DNA, 646 bp, Canis familiaris; identical to SEQ ID NO: 10422

SEQ ID NO: 220530 - DNA, 662 bp, Canis familiaris; identical to SEQ ID NO: 10423

SEQ ID NO: 220531 - DNA, 585 bp, Canis familiaris; identical to SEQ ID NO: 10424

SEQ ID NO: 220532 - DNA, 634 bp, Canis familiaris; identical to SEQ ID NO: 10425
  misc_feature (302)..(302): n is a, c, g, or t

SEQ ID NO: 220533 - DNA, 633 bp, Canis familiaris; identical to SEQ ID NO: 10426

SEQ ID NO: 220534 - DNA, 239 bp, Canis familiaris; identical to SEQ ID NO: 10427

SEQ ID NO: 220535 - DNA, 609 bp, Canis familiaris; identical to SEQ ID NO: 10428

SEQ ID NO: 220536 - DNA, 474 bp, Canis familiaris; identical to SEQ ID NO: 10429

SEQ ID NO: 220537 - DNA, 106 bp, Canis familiaris; identical to SEQ ID NO: 10430

SEQ ID NO: 220538 - DNA, 587 bp, Canis familiaris; identical to SEQ ID NO: 10431

SEQ ID NO: 220539 - DNA, 618 bp, Canis familiaris; identical to SEQ ID NO: 10432
  misc_feature (236)..(236): n is a, c, g, or t

SEQ ID NO: 220540 - DNA, 468 bp, Canis familiaris; identical to SEQ ID NO: 10433

SEQ ID NO: 220541 - DNA, 420 bp, Canis familiaris; identical to SEQ ID NO: 10434

SEQ ID NO: 220542 - DNA, 420 bp, Canis familiaris; identical to SEQ ID NO: 10435

SEQ ID NO: 220543 - DNA, 676 bp, Canis familiaris; identical to SEQ ID NO: 10436
  misc_feature (1)..(1): n is a, c, g, or t
  misc_feature (277)..(277): n is a, c, g, or t

SEQ ID NO: 220544 - DNA, 487 bp, Canis familiaris; identical to SEQ ID NO: 10437

SEQ ID NO: 220545 - DNA, 637 bp, Canis familiaris; identical to SEQ ID NO: 10438

SEQ ID NO: 220546 - DNA, 599 bp, Canis familiaris; identical to SEQ ID NO: 10439

SEQ ID NO: 220547 - DNA, 615 bp, Canis familiaris; identical to SEQ ID NO: 10440
  misc_feature (1)..(1): n is a, c, g, or t

SEQ ID NO: 220548 - DNA, 569 bp, Canis familiaris; identical to SEQ ID NO: 10441

SEQ ID NO: 220549 - DNA, 629 bp, Canis familiaris; identical to SEQ ID NO: 10442

SEQ ID NO: 220550 - DNA, 339 bp, Canis familiaris; identical to SEQ ID NO: 10443

SEQ ID NO: 220551 - DNA, 593 bp, Canis familiaris; identical to SEQ ID NO: 10444

SEQ ID NO: 220552 - DNA, 578 bp, Canis familiaris; identical to SEQ ID NO: 10445
  misc_feature (1)..(1): n is a, c, g, or t

SEQ ID NO: 220553 - DNA, 560 bp, Canis familiaris; identical to SEQ ID NO: 10446

SEQ ID NO: 220554 - DNA, 607 bp, Canis familiaris; identical to SEQ ID NO: 10447

SEQ ID NO: 220555 - DNA, 338 bp, Canis familiaris; identical to SEQ ID NO: 10448

SEQ ID NO: 220556 - DNA, 701 bp, Canis familiaris; identical to SEQ ID NO: 10449

SEQ ID NO: 220557 - DNA, 666 bp, Canis familiaris; identical to SEQ ID NO: 10450
  misc_feature (420)..(420): n is a, c, g, or t

SEQ ID NO: 220558 - DNA, 615 bp, Canis familiaris; identical to SEQ ID NO: 10451
  misc_feature (59)..(59): n is a, c, g, or t

SEQ ID NO: 220559 - DNA, 583 bp, Canis familiaris; identical to SEQ ID NO: 10452

SEQ ID NO: 220560 - DNA, 506 bp, Canis familiaris; identical to SEQ ID NO: 10453

SEQ ID NO: 220561 - DNA, 562 bp, Canis familiaris; identical to SEQ ID NO: 10454

SEQ ID NO: 220562 - DNA, 546 bp, Canis familiaris; identical to SEQ ID NO: 10455

SEQ ID NO: 220563 - DNA, 632 bp, Canis familiaris; identical to SEQ ID NO: 10456
  misc_feature (182)..(182): n is a, c, g, or t

SEQ ID NO: 220564 - DNA, 653 bp, Canis familiaris; identical to SEQ ID NO: 10457

SEQ ID NO: 220565 - DNA, 664 bp, Canis familiaris; identical to SEQ ID NO: 10458
  misc_feature (372)..(372): n is a, c, g, or t

SEQ ID NO: 220566 - DNA, 608 bp, Canis familiaris; identical to SEQ ID NO: 10459
  misc_feature (1)..(1): n is a, c, g, or t

SEQ ID NO: 220567 - DNA, 588 bp, Canis familiaris; identical to SEQ ID NO: 10460

SEQ ID NO: 220568 - DNA, 340 bp, Canis familiaris; identical to SEQ ID NO: 10461

SEQ ID NO: 220569 - DNA, 631 bp, Canis familiaris; identical to SEQ ID NO: 10462
  misc_feature (1)..(1): n is a, c, g, or t

SEQ ID NO: 220570 - DNA, 648 bp, Canis familiaris; identical to SEQ ID NO: 10463
  misc_feature (246)..(246): n is a, c, g, or t

SEQ ID NO: 220571 - DNA, 243 bp, Canis familiaris; identical to SEQ ID NO: 10464

SEQ ID NO: 220572 - DNA, 588 bp, Canis familiaris; identical to SEQ ID NO: 10465

SEQ ID NO: 220573 - DNA, 517 bp, Canis familiaris; identical to SEQ ID NO: 10466

SEQ ID NO: 220574 - DNA, 587 bp, Canis familiaris; identical to SEQ ID NO: 10467

SEQ ID NO: 220575 - DNA, 549 bp, Canis familiaris; identical to SEQ ID NO: 10468

SEQ ID NO: 220576 - DNA, 658 bp, Canis familiaris; identical to SEQ ID NO: 10469

SEQ ID NO: 220577 - DNA, 655 bp, Canis familiaris; identical to SEQ ID NO: 10470

SEQ ID NO: 220578 - DNA, 675 bp, Canis familiaris; identical to SEQ ID NO: 10471

SEQ ID NO: 220579 - DNA, 704 bp, Canis familiaris; identical to SEQ ID NO: 10472
  misc_feature (261)..(261): n is a, c, g, or t

SEQ ID NO: 220580 - DNA, 616 bp, Canis familiaris; identical to SEQ ID NO: 10473
  misc_feature (169)..(169): n is a, c, g, or t

SEQ ID NO: 220581 - DNA, 496 bp, Canis familiaris; identical to SEQ ID NO: 10474

SEQ ID NO: 220582 - DNA, 667 bp, Canis familiaris; identical to SEQ ID NO: 10475

SEQ ID NO: 220583 - DNA, 649 bp, Canis familiaris; identical to SEQ ID NO: 10476
  misc_feature (1)..(1): n is a, c, g, or t
  misc_feature (626)..(626): n is a, c, g, or t

SEQ ID NO: 220584 - DNA, 659 bp, Canis familiaris; identical to SEQ ID NO: 10477
  misc_feature (1)..(1): n is a, c, g, or t

SEQ ID NO: 220585 - DNA, 661 bp, Canis familiaris; identical to SEQ ID NO: 10478

SEQ ID NO: 220586 - DNA, 652 bp, Canis familiaris; identical to SEQ ID NO: 10479

SEQ ID NO: 220587 - DNA, 297 bp, Canis familiaris; identical to SEQ ID NO: 10480

SEQ ID NO: 220588 - DNA, 602 bp, Canis familiaris; identical to SEQ ID NO: 10481

SEQ ID NO: 220589 - DNA, 691 bp, Canis familiaris; identical to SEQ ID NO: 10482

SEQ ID NO: 220590 - DNA, 676 bp, Canis familiaris; identical to SEQ ID NO: 10483
  misc_feature (1)..(1): n is a, c, g, or t

SEQ ID NO: 220591 - DNA, 631 bp, Canis familiaris; identical to SEQ ID NO: 10484

SEQ ID NO: 220592 - DNA, 667 bp, Canis familiaris; identical to SEQ ID NO: 10485

SEQ ID NO: 220593 - DNA, 593 bp, Canis familiaris; identical to SEQ ID NO: 10486

SEQ ID NO: 220594 - DNA, 662 bp, Canis familiaris; identical to SEQ ID NO: 10487

SEQ ID NO: 220595 - DNA, 262 bp, Canis familiaris; identical to SEQ ID NO: 10488

SEQ ID NO: 220596 - DNA, 644 bp, Canis familiaris; identical to SEQ ID NO: 10489

SEQ ID NO: 220597 - DNA, 646 bp, Canis familiaris; identical to SEQ ID NO: 10490
  misc_feature (366)..(366): n is a, c, g, or t

SEQ ID NO: 220598 - DNA, 627 bp, Canis familiaris; identical to SEQ ID NO: 10491

SEQ ID NO: 220599 - DNA, 691 bp, Canis familiaris; identical to SEQ ID NO: 10492
  misc_feature (320)..(320): n is a, c, g, or t
  misc_feature (504)..(504): n is a, c, g, or t
  misc_feature (510)..(510): n is a, c, g, or t

SEQ ID NO: 220600 - DNA, 686 bp, Canis familiaris; identical to SEQ ID NO: 10493

SEQ ID NO: 220601 - DNA, 547 bp, Canis familiaris; identical to SEQ ID NO: 10494

SEQ ID NO: 220602 - DNA, 101 bp, Canis familiaris; identical to SEQ ID NO: 10495

SEQ ID NO: 220603 - DNA, 665 bp, Canis familiaris; identical to SEQ ID NO: 10496
  misc_feature (542)..(542): n is a, c, g, or t

SEQ ID NO: 220604 - DNA, 212 bp, Canis familiaris; identical to SEQ ID NO: 10497

SEQ ID NO: 220605 - DNA, 631 bp, Canis familiaris; identical to SEQ ID NO: 10498

SEQ ID NO: 220606 - DNA, 528 bp, Canis familiaris; identical to SEQ ID NO: 10499
  misc_feature (160)..(160): n is a, c, g, or t
  misc_feature (195)..(195): n is a, c, g, or t

SEQ ID NO: 220607 - DNA, 599 bp, Canis familiaris; identical to SEQ ID NO: 10500

SEQ ID NO: 220608 - DNA, 696 bp, Canis familiaris; identical to SEQ ID NO: 10501

SEQ ID NO: 220609 - DNA, 607 bp, Canis familiaris; identical to SEQ ID NO: 10502

SEQ ID NO: 220610 - DNA, 617 bp, Canis familiaris; identical to SEQ ID NO: 10503
  misc_feature (44)..(44): n is a, c, g, or t
  misc_feature (527)..(527): n is a, c, g, or t
  misc_feature (564)..(564): n is a, c, g, or t
  misc_feature (572)..(572): n is a, c, g, or t

SEQ ID NO: 220611 - DNA, 635 bp, Canis familiaris; identical to SEQ ID NO: 10504
  misc_feature (253)..(253): n is a, c, g, or t

SEQ ID NO: 220612 - DNA, 418 bp, Canis familiaris; identical to SEQ ID NO: 10505

SEQ ID NO: 220613 - DNA, 641 bp, Canis familiaris; identical to SEQ ID NO: 10506

SEQ ID NO: 220614 - DNA, 431 bp, Canis familiaris; identical to SEQ ID NO: 10507
  misc_feature (1)..(1): n is a, c, g, or t
  misc_feature (286)..(286): n is a, c, g, or t

SEQ ID NO: 220615 - DNA, 501 bp, Canis familiaris; identical to SEQ ID NO: 10508
  misc_feature (251)..(251): n is a, c, g, or t

SEQ ID NO: 220616 - DNA, 531 bp, Canis familiaris; identical to SEQ ID NO: 10509

SEQ ID NO: 220617 - DNA, 524 bp, Canis familiaris; identical to SEQ ID NO: 10510

SEQ ID NO: 220618 - DNA, 326 bp, Canis familiaris; identical to SEQ ID NO: 10511

SEQ ID NO: 220619 - DNA, 535 bp, Canis familiaris; identical to SEQ ID NO: 10512

SEQ ID NO: 220620 - DNA, 549 bp, Canis familiaris; identical to SEQ ID NO: 10513

SEQ ID NO: 220621 - DNA, 515 bp, Canis familiaris; identical to SEQ ID NO: 10514

SEQ ID NO: 220622 - DNA, 739 bp, Canis familiaris; identical to SEQ ID NO: 10515
  misc_feature (160)..(160): n is a, c, g, or t

SEQ ID NO: 220623 - DNA, 555 bp, Canis familiaris; identical to SEQ ID NO: 10516

SEQ ID NO: 220624 - DNA, 631 bp, Canis familiaris; identical to SEQ ID NO: 10517

SEQ ID NO: 220625 - DNA, 559 bp, Canis familiaris; identical to SEQ ID NO: 10518

SEQ ID NO: 220626 - DNA, 639 bp, Canis familiaris; identical to SEQ ID NO: 10519

SEQ ID NO: 220627 - DNA, 597 bp, Canis familiaris; identical to SEQ ID NO: 10520

SEQ ID NO: 220628 - DNA, 559 bp, Canis familiaris; identical to SEQ ID NO: 10521

SEQ ID NO: 220629 - DNA, 547 bp, Canis familiaris; identical to SEQ ID NO: 10522

SEQ ID NO: 220630 - DNA, 582 bp, Canis familiaris; identical to SEQ ID NO: 10523

SEQ ID NO: 220631 - DNA, 268 bp, Canis familiaris; identical to SEQ ID NO: 10524

SEQ ID NO: 220632 - DNA, 581 bp, Canis familiaris; identical to SEQ ID NO: 10525

SEQ ID NO: 220633 - DNA, 480 bp, Canis familiaris; identical to SEQ ID NO: 10526

SEQ ID NO: 220634 - DNA, 396 bp, Canis familiaris; identical to SEQ ID NO: 10527

SEQ ID NO: 220635 - DNA, 619 bp, Canis familiaris; identical to SEQ ID NO: 10528
  misc_feature (160)..(160): n is a, c, g, or t

SEQ ID NO: 220636 - DNA, 135 bp, Canis familiaris; identical to SEQ ID NO: 10529

SEQ ID NO: 220637 - DNA, 609 bp, Canis familiaris; identical to SEQ ID NO: 10530

SEQ ID NO: 220638 - DNA, 612 bp, Canis familiaris; identical to SEQ ID NO: 10531

SEQ ID NO: 220639 - DNA, 560 bp, Canis familiaris; identical to SEQ ID NO: 10532

SEQ ID NO: 220640 - DNA, 630 bp, Canis familiaris; identical to SEQ ID NO: 10533

SEQ ID NO: 220641 - DNA, 665 bp, Canis familiaris; identical to SEQ ID NO: 10534

SEQ ID NO: 220642 - DNA, 382 bp, Canis familiaris; identical to SEQ ID NO: 10535

SEQ ID NO: 220643 - DNA, 653 bp, Canis familiaris; identical to SEQ ID NO: 10536

SEQ ID NO: 220644 - DNA, 544 bp, Canis familiaris; identical to SEQ ID NO: 10537

SEQ ID NO: 220645 - DNA, 304 bp, Canis familiaris; identical to SEQ ID NO: 10538

SEQ ID NO: 220646 - DNA, 631 bp, Canis familiaris; identical to SEQ ID NO: 10539

SEQ ID NO: 220647 - DNA, 584 bp, Canis familiaris; identical to SEQ ID NO: 10540
  misc_feature (128)..(128): n is a, c, g, or t

SEQ ID NO: 220648 - DNA, 451 bp, Canis familiaris; identical to SEQ ID NO: 10541
  misc_feature (69)..(69): n is a, c, g, or t

SEQ ID NO: 220649 - DNA, 613 bp, Canis familiaris; identical to SEQ ID NO: 10542

SEQ ID NO: 220650 - DNA, 553 bp, Canis familiaris; identical to SEQ ID NO: 10543

SEQ ID NO: 220651 - DNA, 336 bp, Canis familiaris; identical to SEQ ID NO: 10544

SEQ ID NO: 220652 - DNA, 483 bp, Canis familiaris; identical to SEQ ID NO: 10545

SEQ ID NO: 220653 - DNA, 641 bp, Canis familiaris; identical to SEQ ID NO: 10546

SEQ ID NO: 220654 - DNA, 556 bp, Canis familiaris; identical to SEQ ID NO: 10547

SEQ ID NO: 220655 - DNA, 490 bp, Canis familiaris; identical to SEQ ID NO: 10548

SEQ ID NO: 220656 - DNA, 594 bp, Canis familiaris; identical to SEQ ID NO: 10549

SEQ ID NO: 220657 - DNA, 631 bp, Canis familiaris; identical to SEQ ID NO: 10550

SEQ ID NO: 220658 - DNA, 590 bp, Canis familiaris; identical to SEQ ID NO: 10551
  misc_feature (167)..(167): n is a, c, g, or t
  misc_feature (210)..(210): n is a, c, g, or t
  misc_feature (274)..(274): n is a, c, g, or t

SEQ ID NO: 220659 - DNA, 730 bp, Canis familiaris; identical to SEQ ID NO: 10552

SEQ ID NO: 220660 - DNA, 627 bp, Canis familiaris; identical to SEQ ID NO: 10553

SEQ ID NO: 220661 - DNA, 648 bp, Canis familiaris; identical to SEQ ID NO: 10554
  misc_feature (1)..(1): n is a, c, g, or t

SEQ ID NO: 220662 - DNA, 544 bp, Canis familiaris; identical to SEQ ID NO: 10555

SEQ ID NO: 220663 - DNA, 498 bp, Canis familiaris; identical to SEQ ID NO: 10556

SEQ ID NO: 220664 - DNA, 668 bp, Canis familiaris; identical to SEQ ID NO: 10557

SEQ ID NO: 220665 - DNA, 569 bp, Canis familiaris; identical to SEQ ID NO: 10558

SEQ ID NO: 220666 - DNA, 663 bp, Canis familiaris; identical to SEQ ID NO: 10559

SEQ ID NO: 220667 - DNA, 577 bp, Canis familiaris; identical to SEQ ID NO: 10560

SEQ ID NO: 220668 - DNA, 610 bp, Canis familiaris; identical to SEQ ID NO: 10561

SEQ ID NO: 220669 - DNA, 624 bp, Canis familiaris; identical to SEQ ID NO: 10562

SEQ ID NO: 220670 - DNA, 386 bp, Canis familiaris; identical to SEQ ID NO: 10563
  misc_feature (109)..(109): n is a, c, g, or t

SEQ ID NO: 220671 - DNA, 639 bp, Canis familiaris; identical to SEQ ID NO: 10564
  misc_feature (112)..(112): n is a, c, g, or t

SEQ ID NO: 220672 - DNA, 537 bp, Canis familiaris; identical to SEQ ID NO: 10565

SEQ ID NO: 220673 - DNA, 673 bp, Canis familiaris; identical to SEQ ID NO: 10566

SEQ ID NO: 220674 - DNA, 620 bp, Canis familiaris; identical to SEQ ID NO: 10567

SEQ ID NO: 220675 - DNA, 494 bp, Canis familiaris; identical to SEQ ID NO: 10568

SEQ ID NO: 220676 - DNA, 562 bp, Canis familiaris; identical to SEQ ID NO: 10569
  misc_feature (249)..(249): n is a, c, g, or t
  misc_feature (262)..(262): n is a, c, g, or t
  misc_feature (297)..(297): n is a, c, g, or t
  misc_feature (331)..(331): n is a, c, g, or t

SEQ ID NO: 220677 - DNA, 682 bp, Canis familiaris; identical to SEQ ID NO: 10570

SEQ ID NO: 220678 - DNA, 607 bp, Canis familiaris; identical to SEQ ID NO: 10571

SEQ ID NO: 220679 - DNA, 220 bp, Canis familiaris; identical to SEQ ID NO: 10572

SEQ ID NO: 220680 - DNA, 512 bp, Canis familiaris; identical to SEQ ID NO: 10573

SEQ ID NO: 220681 - DNA, 427 bp, Canis familiaris; identical to SEQ ID NO: 10574
  misc_feature (2)..(2): n is a, c, g, or t
  misc_feature (23)..(23): n is a, c, g, or t
  misc_feature (44)..(44): n is a, c, g, or t
  misc_feature (60)..(60): n is a, c, g, or t
  misc_feature (74)..(75): n is a, c, g, or t
  misc_feature (93)..(93): n is a, c, g, or t
  misc_feature (99)..(99): n is a, c, g, or t

SEQ ID NO: 220682 - DNA, 602 bp, Canis familiaris; identical to SEQ ID NO: 10575

SEQ ID NO: 220683 - DNA, 190 bp, Canis familiaris; identical to SEQ ID NO: 10576

SEQ ID NO: 220684 - DNA, 481 bp, Canis familiaris; identical to SEQ ID NO: 10577

SEQ ID NO: 220685 - DNA, 636 bp, Canis familiaris; identical to SEQ ID NO: 10578

SEQ ID NO: 220686 - DNA, 526 bp, Canis familiaris; identical to SEQ ID NO: 10579

SEQ ID NO: 220687 - DNA, 549 bp, Canis familiaris; identical to SEQ ID NO: 10580

SEQ ID NO: 220688 - DNA, 641 bp, Canis familiaris; identical to SEQ ID NO: 10581

SEQ ID NO: 220689 - DNA, 652 bp, Canis familiaris; identical to SEQ ID NO: 10582

SEQ ID NO: 220690 - DNA, 584 bp, Canis familiaris; identical to SEQ ID NO: 10583

SEQ ID NO: 220691 - DNA, 610 bp, Canis familiaris; identical to SEQ ID NO: 10584
  misc_feature (376)..(376): n is a, c, g, or t

SEQ ID NO: 220692 - DNA, 347 bp, Canis familiaris; identical to SEQ ID NO: 10585

SEQ ID NO: 220693 - DNA, 491 bp, Canis familiaris; identical to SEQ ID NO: 10586

SEQ ID NO: 220694 - DNA, 225 bp, Canis familiaris; identical to SEQ ID NO: 10587

SEQ ID NO: 220695 - DNA, 625 bp, Canis familiaris; identical to SEQ ID NO: 10588

SEQ ID NO: 220696 - DNA, 588 bp, Canis familiaris; identical to SEQ ID NO: 10589

SEQ ID NO: 220697 - DNA, 640 bp, Canis familiaris; identical to SEQ ID NO: 10590

SEQ ID NO: 220698 - DNA, 627 bp, Canis familiaris; identical to SEQ ID NO: 10591

SEQ ID NO: 220699 - DNA, 535 bp, Canis familiaris; identical to SEQ ID NO: 10592

SEQ ID NO: 220700 - DNA, 545 bp, Canis familiaris; identical to SEQ ID NO: 10593

SEQ ID NO: 220701 - DNA, 415 bp, Canis familiaris; identical to SEQ ID NO: 10594
  misc_feature (41)..(41): n is a, c, g, or t
  misc_feature (81)..(82): n is a, c, g, or t
  misc_feature (181)..(181): n is a, c, g, or t

SEQ ID NO: 220702 - DNA, 716 bp, Canis familiaris; identical to SEQ ID NO: 10595

SEQ ID NO: 220703 - DNA, 583 bp, Canis familiaris; identical to SEQ ID NO: 10596

SEQ ID NO: 220704 - DNA, 610 bp, Canis familiaris; identical to SEQ ID NO: 10597

SEQ ID NO: 220705 - DNA, 496 bp, Canis familiaris; identical to SEQ ID NO: 10598

SEQ ID NO: 220706 - DNA, 398 bp, Canis familiaris; identical to SEQ ID NO: 10599

SEQ ID NO: 220707 - DNA, 597 bp, Canis familiaris; identical to SEQ ID NO: 10600

SEQ ID NO: 220708 - DNA, 574 bp, Canis familiaris; identical to SEQ ID NO: 10601

SEQ ID NO: 220709 - DNA, 666 bp, Canis familiaris; identical to SEQ ID NO: 10602

SEQ ID NO: 220710 - DNA, 561 bp, Canis familiaris; identical to SEQ ID NO: 10603
  misc_feature (306)..(306): n is a, c, g, or t

SEQ ID NO: 220711 - DNA, 237 bp, Canis familiaris; identical to SEQ ID NO: 10604

SEQ ID NO: 220712 - DNA, 594 bp, Canis familiaris; identical to SEQ ID NO: 10605

SEQ ID NO: 220713 - DNA, 609 bp, Canis familiaris; identical to SEQ ID NO: 10606

SEQ ID NO: 220714 - DNA, 696 bp, Canis familiaris; identical to SEQ ID NO: 10607
  misc_feature (44)..(44): n is a, c, g, or t

SEQ ID NO: 220715 - DNA, 579 bp, Canis familiaris; identical to SEQ ID NO: 10608

SEQ ID NO: 220716 - DNA, 637 bp, Canis familiaris; identical to SEQ ID NO: 10609

SEQ ID NO: 220717 - DNA, 608 bp, Canis familiaris; identical to SEQ ID NO: 10610

SEQ ID NO: 220718 - DNA, 606 bp, Canis familiaris; identical to SEQ ID NO: 10611

SEQ ID NO: 220719 - DNA, 585 bp, Canis familiaris; identical to SEQ ID NO: 10612

SEQ ID NO: 220720 - DNA, 645 bp, Canis familiaris; identical to SEQ ID NO: 10613

SEQ ID NO: 220721 - DNA, 522 bp, Canis familiaris; identical to SEQ ID NO: 10614
  misc_feature (1)..(1): n is a, c, g, or t

SEQ ID NO: 220722 - DNA, 603 bp, Canis familiaris; identical to SEQ ID NO: 10615

SEQ ID NO: 220723 - DNA, 632 bp, Canis familiaris; identical to SEQ ID NO: 10616
  misc_feature (1)..(1): n is a, c, g, or t

SEQ ID NO: 220724 - DNA, 677 bp, Canis familiaris; identical to SEQ ID NO: 10617

SEQ ID NO: 220725 - DNA, 542 bp, Canis familiaris; identical to SEQ ID NO: 10618

SEQ ID NO: 220726 - DNA, 722 bp, Canis familiaris; identical to SEQ ID NO: 10619
  misc_feature (135)..(135): n is a, c, g, or t

SEQ ID NO: 220727 - DNA, 569 bp, Canis familiaris; identical to SEQ ID NO: 10620

SEQ ID NO: 220728 - DNA, 490 bp, Canis familiaris; identical to SEQ ID NO: 10621
  misc_feature (1)..(1): n is a, c, g, or t

SEQ ID NO: 220729 - DNA, 749 bp, Canis familiaris; identical to SEQ ID NO: 10622
  misc_feature (287)..(287): n is a, c, g, or t

SEQ ID NO: 220730 - DNA, 605 bp, Canis familiaris; identical to SEQ ID NO: 10623

SEQ ID NO: 220731 - DNA, 461 bp, Canis familiaris; identical to SEQ ID NO: 10624
  misc_feature (229)..(229): n is a, c, g, or t

SEQ ID NO: 220732 - DNA, 625 bp, Canis familiaris; identical to SEQ ID NO: 10625

SEQ ID NO: 220733 - DNA, 665 bp, Canis familiaris; identical to SEQ ID NO: 10626
  misc_feature (317)..(317): n is a, c, g, or t

SEQ ID NO: 220734 - DNA, 618 bp, Canis familiaris; identical to SEQ ID NO: 10627

SEQ ID NO: 220735 - DNA, 728 bp, Canis familiaris; identical to SEQ ID NO: 10628

SEQ ID NO: 220736 - DNA, 639 bp, Canis familiaris; identical to SEQ ID NO: 10629

SEQ ID NO: 220737 - DNA, 564 bp, Canis familiaris; identical to SEQ ID NO: 10630

SEQ ID NO: 220738 - DNA, 519 bp, Canis familiaris; identical to SEQ ID NO: 10631

SEQ ID NO: 220739 - DNA, 647 bp, Canis familiaris; identical to SEQ ID NO: 10632

SEQ ID NO: 220740 - DNA, 701 bp, Canis familiaris; identical to SEQ ID NO: 10633

SEQ ID NO: 220741 - DNA, 282 bp, Canis familiaris; identical to SEQ ID NO: 10634

SEQ ID NO: 220742 - DNA, 599 bp, Canis familiaris; identical to SEQ ID NO: 10635

SEQ ID NO: 220743 - DNA, 552 bp, Canis familiaris; identical to SEQ ID NO: 10636
  misc_feature (197)..(197): n is a, c, g, or t

SEQ ID NO: 220744 - DNA, 661 bp, Canis familiaris; identical to SEQ ID NO: 10637

SEQ ID NO: 220745 - DNA, 716 bp, Canis familiaris; identical to SEQ ID NO: 10638
  misc_feature (387)..(387): n is a, c, g, or t
  misc_feature (459)..(459): n is a, c, g, or t

SEQ ID NO: 220746 - DNA, 617 bp, Canis familiaris; identical to SEQ ID NO: 10639
  misc_feature (225)..(226): n is a, c, g, or t
  misc_feature (397)..(397): n is a, c, g, or t

SEQ ID NO: 220747 - DNA, 591 bp, Canis familiaris; identical to SEQ ID NO: 10640

SEQ ID NO: 220748 - DNA, 556 bp, Canis familiaris; identical to SEQ ID NO: 10641

SEQ ID NO: 220749 - DNA, 460 bp, Canis familiaris; identical to SEQ ID NO: 10642

SEQ ID NO: 220750 - DNA, 511 bp, Canis familiaris; identical to SEQ ID NO: 10643

SEQ ID NO: 220751 - DNA, 499 bp, Canis familiaris; identical to SEQ ID NO: 10644

SEQ ID NO: 220752 - DNA, 560 bp, Canis familiaris; identical to SEQ ID NO: 10645

SEQ ID NO: 220753 - DNA, 157 bp, Canis familiaris; identical to SEQ ID NO: 10646

SEQ ID NO: 220754 - DNA, 639 bp, Canis familiaris; identical to SEQ ID NO: 10647

SEQ ID NO: 220755 - DNA, 642 bp, Canis familiaris; identical to SEQ ID NO: 10648

SEQ ID NO: 220756 - DNA, 657 bp, Canis familiaris; identical to SEQ ID NO: 10649
  misc_feature (483)..(483): n is a, c, g, or t

SEQ ID NO: 220757 - DNA, 428 bp, Canis familiaris; identical to SEQ ID NO: 10650

SEQ ID NO: 220758 - DNA, 559 bp, Canis familiaris; identical to SEQ ID NO: 10651

SEQ ID NO: 220759 - DNA, 561 bp, Canis familiaris; identical to SEQ ID NO: 10652
  misc_feature (295)..(295): n is a, c, g, or t
  misc_feature (310)..(310): n is a, c, g, or t
  misc_feature (324)..(324): n is a, c, g, or t
  misc_feature (359)..(359): n is a, c, g, or t
  misc_feature (392)..(392): n is a, c, g, or t

SEQ ID NO: 220760 - DNA, 663 bp, Canis familiaris; identical to SEQ ID NO: 10653

SEQ ID NO: 220761 - DNA, 563 bp, Canis familiaris; identical to SEQ ID NO: 10654
  misc_feature (1)..(1): n is a, c, g, or t

SEQ ID NO: 220762 - DNA, 642 bp, Canis familiaris; identical to SEQ ID NO: 10655

SEQ ID NO: 220763 - DNA, 551 bp, Canis familiaris; identical to SEQ ID NO: 10656

SEQ ID NO: 220764 - DNA, 663 bp, Canis familiaris; identical to SEQ ID NO: 10657

SEQ ID NO: 220765 - DNA, 618 bp, Canis familiaris; identical to SEQ ID NO: 10658

SEQ ID NO: 220766 - DNA, 176 bp, Canis familiaris; identical to SEQ ID NO: 10659

SEQ ID NO: 220767 - DNA, 665 bp, Canis familiaris; identical to SEQ ID NO: 10660

SEQ ID NO: 220768 - DNA, 641 bp, Canis familiaris; identical to SEQ ID NO: 10661

SEQ ID NO: 220769 - DNA, 520 bp, Canis familiaris; identical to SEQ ID NO: 10662

SEQ ID NO: 220770 - DNA, 542 bp, Canis familiaris; identical to SEQ ID NO: 10663

SEQ ID NO: 220771 - DNA, 526 bp, Canis familiaris; identical to SEQ ID NO: 10664

SEQ ID NO: 220772 - DNA, 577 bp, Canis familiaris; identical to SEQ ID NO: 10665
  misc_feature (192)..(192): n is a, c, g, or t

SEQ ID NO: 220773 - DNA, 599 bp, Canis familiaris; identical to SEQ ID NO: 10666

SEQ ID NO: 220774 - DNA, 592 bp, Canis familiaris; identical to SEQ ID NO: 10667

SEQ ID NO: 220775 - DNA, 538 bp, Canis familiaris; identical to SEQ ID NO: 10668

SEQ ID NO: 220776 - DNA, 444 bp, Canis familiaris; identical to SEQ ID NO: 10669

SEQ ID NO: 220777 - DNA, 544 bp, Canis familiaris; identical to SEQ ID NO: 10670

SEQ ID NO: 220778 - DNA, 517 bp, Canis familiaris; identical to SEQ ID NO: 10671
  misc_feature (159)..(159): n is a, c, g, or t

SEQ ID NO: 220779 - DNA, 399 bp, Canis familiaris; identical to SEQ ID NO: 10672

SEQ ID NO: 220780 - DNA, 614 bp, Canis familiaris; identical to SEQ ID NO: 10673
  misc_feature (443)..(443): n is a, c, g, or t

SEQ ID NO: 220781 - DNA, 503 bp, Canis familiaris; identical to SEQ ID NO: 10674

SEQ ID NO: 220782 - DNA, 595 bp, Canis familiaris; identical to SEQ ID NO: 10675

SEQ ID NO: 220783 - DNA, 612 bp, Canis familiaris; identical to SEQ ID NO: 10676

SEQ ID NO: 220784 - DNA, 679 bp, Canis familiaris; identical to SEQ ID NO: 10677

SEQ ID NO: 220785 - DNA, 520 bp, Canis familiaris; identical to SEQ ID NO: 10678

SEQ ID NO: 220786 - DNA, 652 bp, Canis familiaris; identical to SEQ ID NO: 10679

SEQ ID NO: 220787 - DNA, 532 bp, Canis familiaris; identical to SEQ ID NO: 10680

SEQ ID NO: 220788 - DNA, 541 bp, Canis familiaris; identical to SEQ ID NO: 10681

SEQ ID NO: 220789 - DNA, 585 bp, Canis familiaris; identical to SEQ ID NO: 10682

SEQ ID NO: 220790 - DNA, 580 bp, Canis familiaris; identical to SEQ ID NO: 10683

SEQ ID NO: 220791 - DNA, 581 bp, Canis familiaris; identical to SEQ ID NO: 10684

SEQ ID NO: 220792 - DNA, 639 bp, Canis familiaris; identical to SEQ ID NO: 10685

SEQ ID NO: 220793 - DNA, 508 bp, Canis familiaris; identical to SEQ ID NO: 10686

SEQ ID NO: 220794 - DNA, 117 bp, Canis familiaris; identical to SEQ ID NO: 10687

SEQ ID NO: 220795 - DNA, 507 bp, Canis familiaris; identical to SEQ ID NO: 10688

SEQ ID NO: 220796 - DNA, 605 bp, Canis familiaris; identical to SEQ ID NO: 10689

SEQ ID NO: 220797 - DNA, 647 bp, Canis familiaris; identical to SEQ ID NO: 10690

SEQ ID NO: 220798 - DNA, 610 bp, Canis familiaris; identical to SEQ ID NO: 10691

SEQ ID NO: 220799 - DNA, 454 bp, Canis familiaris; identical to SEQ ID NO: 10692

SEQ ID NO: 220800 - DNA, 517 bp, Canis familiaris; identical to SEQ ID NO: 10693

SEQ ID NO: 220801 - DNA, 619 bp, Canis familiaris; identical to SEQ ID NO: 10694

SEQ ID NO: 220802 - DNA, 693 bp, Canis familiaris; identical to SEQ ID NO: 10695
  misc_feature (86)..(86): n is a, c, g, or t

SEQ ID NO: 220803 - DNA, 600 bp, Canis familiaris; identical to SEQ ID NO: 10696

SEQ ID NO: 220804 - DNA, 706 bp, Canis familiaris; identical to SEQ ID NO: 10697
  misc_feature (70)..(70): n is a, c, g, or t

SEQ ID NO: 220805 - DNA, 737 bp, Canis familiaris; identical to SEQ ID NO: 10698

SEQ ID NO: 220806 - DNA, 193 bp, Canis familiaris; identical to SEQ ID NO: 10699

SEQ ID NO: 220807 - DNA, 665 bp, Canis familiaris; identical to SEQ ID NO: 10700

SEQ ID NO: 220808 - DNA, 347 bp, Canis familiaris; identical to SEQ ID NO: 10701

SEQ ID NO: 220809 - DNA, 635 bp, Canis familiaris; identical to SEQ ID NO: 10702

SEQ ID NO: 220810 - DNA, 711 bp, Canis familiaris; identical to SEQ ID NO: 10703

SEQ ID NO: 220811 - DNA, 348 bp, Canis familiaris; identical to SEQ ID NO: 10704

SEQ ID NO: 220812 - DNA, 396 bp, Canis familiaris; identical to SEQ ID NO: 10705

SEQ ID NO: 220813 - DNA, 658 bp, Canis familiaris; identical to SEQ ID NO: 10706

SEQ ID NO: 220814 - DNA, 499 bp, Canis familiaris; identical to SEQ ID NO: 10707

SEQ ID NO: 220815 - DNA, 669 bp, Canis familiaris; identical to SEQ ID NO: 10708

SEQ ID NO: 220816 - DNA, 599 bp, Canis familiaris; identical to SEQ ID NO: 10709

SEQ ID NO: 220817 - DNA, 551 bp, Canis familiaris; identical to SEQ ID NO: 10710

SEQ ID NO: 220818 - DNA, 536 bp, Canis familiaris; identical to SEQ ID NO: 10711
  misc_feature (1)..(1): n is a, c, g, or t

SEQ ID NO: 220819 - DNA, 104 bp, Canis familiaris; identical to SEQ ID NO: 10712

SEQ ID NO: 220820 - DNA, 216 bp, Canis familiaris; identical to SEQ ID NO: 10713

SEQ ID NO: 220821 - DNA, 595 bp, Canis familiaris; identical to SEQ ID NO: 10714
  misc_feature (1)..(1): n is a, c, g, or t

SEQ ID NO: 220822 - DNA, 466 bp, Canis familiaris; identical to SEQ ID NO: 10715

SEQ ID NO: 220823 - DNA, 615 bp, Canis familiaris; identical to SEQ ID NO: 10716

SEQ ID NO: 220824 - DNA, 556 bp, Canis familiaris; identical to SEQ ID NO: 10717

SEQ ID NO: 220825 - DNA, 633 bp, Canis familiaris; identical to SEQ ID NO: 10718

SEQ ID NO: 220826 - DNA, 574 bp, Canis familiaris; identical to SEQ ID NO: 10719

SEQ ID NO: 220827 - DNA, 619 bp, Canis familiaris; identical to SEQ ID NO: 10720

SEQ ID NO: 220828 - DNA, 550 bp, Canis familiaris; identical to SEQ ID NO: 10721
  misc_feature (1)..(1): n is a, c, g, or t

SEQ ID NO: 220829 - DNA, 600 bp, Canis familiaris; identical to SEQ ID NO: 10722
  misc_feature (1)..(1): n is a, c, g, or t

SEQ ID NO: 220830 - DNA, 593 bp, Canis familiaris; identical to SEQ ID NO: 10723

SEQ ID NO: 220831 - DNA, 647 bp, Canis familiaris; identical to SEQ ID NO: 10724

SEQ ID NO: 220832 - DNA, 664 bp, Canis familiaris; identical to SEQ ID NO: 10725

SEQ ID NO: 220833 - DNA, 642 bp, Canis familiaris; identical to SEQ ID NO: 10726

SEQ ID NO: 220834 - DNA, 513 bp, Canis familiaris; identical to SEQ ID NO: 10727

SEQ ID NO: 220835 - DNA, 623 bp, Canis familiaris; identical to SEQ ID NO: 10728

SEQ ID NO: 220836 - DNA, 664 bp, Canis familiaris; identical to SEQ ID NO: 10729

SEQ ID NO: 220837 - DNA, 498 bp, Canis familiaris; identical to SEQ ID NO: 10730

SEQ ID NO: 220838 - DNA, 559 bp, Canis familiaris; identical to SEQ ID NO: 10731

SEQ ID NO: 220839 - DNA, 612 bp, Canis familiaris; identical to SEQ ID NO: 10732

SEQ ID NO: 220840 - DNA, 705 bp, Canis familiaris; identical to SEQ ID NO: 10733

SEQ ID NO: 220841 - DNA, 615 bp, Canis familiaris; identical to SEQ ID NO: 10734

SEQ ID NO: 220842 - DNA, 613 bp, Canis familiaris; identical to SEQ ID NO: 10735

SEQ ID NO: 220843 - DNA, 634 bp, Canis familiaris; identical to SEQ ID NO: 10736

SEQ ID NO: 220844 - DNA, 642 bp, Canis familiaris; identical to SEQ ID NO: 10737

SEQ ID NO: 220845 - DNA, 652 bp, Canis familiaris; identical to SEQ ID NO: 10738

SEQ ID NO: 220846 - DNA, 594 bp, Canis familiaris; identical to SEQ ID NO: 10739

SEQ ID NO: 220847 - DNA, 632 bp, Canis familiaris; identical to SEQ ID NO: 10740

SEQ ID NO: 220848 - DNA, 612 bp, Canis familiaris; identical to SEQ ID NO: 10741
  misc_feature (116)..(116): n is a, c, g, or t

SEQ ID NO: 220849 - DNA, 697 bp, Canis familiaris; identical to SEQ ID NO: 10742

SEQ ID NO: 220850 - DNA, 649 bp, Canis familiaris; identical to SEQ ID NO: 10743

SEQ ID NO: 220851 - DNA, 549 bp, Canis familiaris; identical to SEQ ID NO: 10744
  misc_feature (34)..(34): n is a, c, g, or t

SEQ ID NO: 220852 - DNA, 609 bp, Canis familiaris; identical to SEQ ID NO: 10745

SEQ ID NO: 220853 - DNA, 675 bp, Canis familiaris; identical to SEQ ID NO: 10746

SEQ ID NO: 220854 - DNA, 213 bp, Canis familiaris; identical to SEQ ID NO: 10747

SEQ ID NO: 220855 - DNA, 446 bp, Canis familiaris; identical to SEQ ID NO: 10748

SEQ ID NO: 220856 - DNA, 638 bp, Canis familiaris; identical to SEQ ID NO: 10749

SEQ ID NO: 220857 - DNA, 636 bp, Canis familiaris; identical to SEQ ID NO: 10750

SEQ ID NO: 220858 - DNA, 702 bp, Canis familiaris; identical to SEQ ID NO: 10751

SEQ ID NO: 220859 - DNA, 587 bp, Canis familiaris; identical to SEQ ID NO: 10752

SEQ ID NO: 220860 - DNA, 651 bp, Canis familiaris; identical to SEQ ID NO: 10753

SEQ ID NO: 220861 - DNA, 591 bp, Canis familiaris; identical to SEQ ID NO: 10754

SEQ ID NO: 220862 - DNA, 542 bp, Canis familiaris; identical to SEQ ID NO: 10755

SEQ ID NO: 220863 - DNA, 624 bp, Canis familiaris; identical to SEQ ID NO: 10756

SEQ ID NO: 220864 - DNA, 646 bp, Canis familiaris; identical to SEQ ID NO: 10757

SEQ ID NO: 220865 - DNA, 633 bp, Canis familiaris; identical to SEQ ID NO: 10758

SEQ ID NO: 220866 - DNA, 617 bp, Canis familiaris; identical to SEQ ID NO: 10759

SEQ ID NO: 220867 - DNA, 343 bp, Canis familiaris; identical to SEQ ID NO: 10760

SEQ ID NO: 220868 - DNA, 653 bp, Canis familiaris; identical to SEQ ID NO: 10761

SEQ ID NO: 220869 - DNA, 603 bp, Canis familiaris; identical to SEQ ID NO: 10762

SEQ ID NO: 220870 - DNA, 588 bp, Canis familiaris; identical to SEQ ID NO: 10763

SEQ ID NO: 220871 - DNA, 246 bp, Canis familiaris; identical to SEQ ID NO: 10764

SEQ ID NO: 220872 - DNA, 667 bp, Canis familiaris; identical to SEQ ID NO: 10765

SEQ ID NO: 220873 - DNA, 287 bp, Canis familiaris; identical to SEQ ID NO: 10766

SEQ ID NO: 220874 - DNA, 704 bp, Canis familiaris; identical to SEQ ID NO: 10767

SEQ ID NO: 220875 - DNA, 641 bp, Canis familiaris; identical to SEQ ID NO: 10768

SEQ ID NO: 220876 - DNA, 669 bp, Canis familiaris; identical to SEQ ID NO: 10769

SEQ ID NO: 220877 - DNA, 646 bp, Canis familiaris; identical to SEQ ID NO: 10770

SEQ ID NO: 220878 - DNA, 660 bp, Canis familiaris; identical to SEQ ID NO: 10771

SEQ ID NO: 220879 - DNA, 615 bp, Canis familiaris; identical to SEQ ID NO: 10772

SEQ ID NO: 220880 - DNA, 620 bp, Canis familiaris; identical to SEQ ID NO: 10773

SEQ ID NO: 220881 - DNA, 588 bp, Canis familiaris; identical to SEQ ID NO: 10774

SEQ ID NO: 220882 - DNA, 647 bp, Canis familiaris; identical to SEQ ID NO: 10775

SEQ ID NO: 220883 - DNA, 627 bp, Canis familiaris; identical to SEQ ID NO: 10776

SEQ ID NO: 220884 - DNA, 592 bp, Canis familiaris; identical to SEQ ID NO: 10777

SEQ ID NO: 220885 - DNA, 593 bp, Canis familiaris; identical to SEQ ID NO: 10778

SEQ ID NO: 220886 - DNA, 653 bp, Canis familiaris; identical to SEQ ID NO: 10779

SEQ ID NO: 220887 - DNA, 659 bp, Canis familiaris; identical to SEQ ID NO: 10780

SEQ ID NO: 220888 - DNA, 574 bp, Canis familiaris; identical to SEQ ID NO: 10781

SEQ ID NO: 220889 - DNA, 683 bp, Canis familiaris; identical to SEQ ID NO: 10782

SEQ ID NO: 220890 - DNA, 685 bp, Canis familiaris; identical to SEQ ID NO: 10783

SEQ ID NO: 220891 - DNA, 655 bp, Canis familiaris; identical to SEQ ID NO: 10784

SEQ ID NO: 220892 - DNA, 131 bp, Canis familiaris; identical to SEQ ID NO: 10785

SEQ ID NO: 220893 - DNA, 569 bp, Canis familiaris; identical to SEQ ID NO: 10786

SEQ ID NO: 220894 - DNA, 146 bp, Canis familiaris; identical to SEQ ID NO: 10787

SEQ ID NO: 220895 - DNA, 621 bp, Canis familiaris; identical to SEQ ID NO: 10788

SEQ ID NO: 220896 - DNA, 528 bp, Canis familiaris; identical to SEQ ID NO: 10789

SEQ ID NO: 220897 - DNA, 603 bp, Canis familiaris; identical to SEQ ID NO: 10790

SEQ ID NO: 220898 - DNA, 591 bp, Canis familiaris; identical to SEQ ID NO: 10791
  misc_feature (373)..(373): n is a, c, g, or t

SEQ ID NO: 220899 - DNA, 627 bp, Canis familiaris; identical to SEQ ID NO: 10792
  misc_feature (158)..(158): n is a, c, g, or t

SEQ ID NO: 220900 - DNA, 603 bp, Canis familiaris; identical to SEQ ID NO: 10793

SEQ ID NO: 220901 - DNA, 476 bp, Canis familiaris; identical to SEQ ID NO: 10794

SEQ ID NO: 220902 - DNA, 501 bp, Canis familiaris; identical to SEQ ID NO: 10795

SEQ ID NO: 220903 - DNA, 574 bp, Canis familiaris; identical to SEQ ID NO: 10796

SEQ ID NO: 220904 - DNA, 334 bp, Canis familiaris; identical to SEQ ID NO: 10797

SEQ ID NO: 220905 - DNA, 620 bp, Canis familiaris; identical to SEQ ID NO: 10798

SEQ ID NO: 220906 - DNA, 644 bp, Canis familiaris; identical to SEQ ID NO: 10799

SEQ ID NO: 220907 - DNA, 658 bp, Canis familiaris; identical to SEQ ID NO: 10800
  misc_feature (172)..(172): n is a, c, g, or t

SEQ ID NO: 220908 - DNA, 660 bp, Canis familiaris; identical to SEQ ID NO: 10801
  misc_feature (7)..(7): n is a, c, g, or t

SEQ ID NO: 220909 - DNA, 530 bp, Canis familiaris; identical to SEQ ID NO: 10802

SEQ ID NO: 220910 - DNA, 684 bp, Canis familiaris; identical to SEQ ID NO: 10803

SEQ ID NO: 220911 - DNA, 653 bp, Canis familiaris; identical to SEQ ID NO: 10804
  misc_feature (131)..(131): n is a, c, g, or t

SEQ ID NO: 220912 - DNA, 691 bp, Canis familiaris; identical to SEQ ID NO: 10805
  misc_feature (2)..(2): n is a, c, g, or t
  misc_feature (41)..(41): n is a, c, g, or t
  misc_feature (62)..(62): n is a, c, g, or t
  misc_feature (117)..(117): n is a, c, g, or t

SEQ ID NO: 220913 - DNA, 685 bp, Canis familiaris; identical to SEQ ID NO: 10806

SEQ ID NO: 220914 - DNA, 616 bp, Canis familiaris; identical to SEQ ID NO: 10807

SEQ ID NO: 220915 - DNA, 620 bp, Canis familiaris; identical to SEQ ID NO: 10808

SEQ ID NO: 220916 - DNA, 630 bp, Canis familiaris; identical to SEQ ID NO: 10809

SEQ ID NO: 220917 - DNA, 692 bp, Canis familiaris; identical to SEQ ID NO: 10810
  misc_feature (6)..(6): n is a, c, g, or t
  misc_feature (509)..(514): n is a, c, g, or t
  misc_feature (524)..(525): n is a, c, g, or t
  misc_feature (540)..(541): n is a, c, g, or t

SEQ ID NO: 220918 - DNA, 694 bp, Canis familiaris; identical to SEQ ID NO: 10811

SEQ ID NO: 220919 - DNA, 654 bp, Canis familiaris; identical to SEQ ID NO: 10812

SEQ ID NO: 220920 - DNA, 651 bp, Canis familiaris; identical to SEQ ID NO: 10813

SEQ ID NO: 220921 - DNA, 700 bp, Canis familiaris; identical to SEQ ID NO: 10814

SEQ ID NO: 220922 - DNA, 603 bp, Canis familiaris; identical to SEQ ID NO: 10815

SEQ ID NO: 220923 - DNA, 658 bp, Canis familiaris; identical to SEQ ID NO: 10816
  misc_feature (44)..(44): n is a, c, g, or t

SEQ ID NO: 220924 - DNA, 568 bp, Canis familiaris; identical to SEQ ID NO: 10817

SEQ ID NO: 220925 - DNA, 681 bp, Canis familiaris; identical to SEQ ID NO: 10818

SEQ ID NO: 220926 - DNA, 671 bp, Canis familiaris; identical to SEQ ID NO: 10819

SEQ ID NO: 220927 - DNA, 637 bp, Canis familiaris; identical to SEQ ID NO: 10820
  misc_feature (56)..(56): n is a, c, g, or t

SEQ ID NO: 220928 - DNA, 404 bp, Canis familiaris; identical to SEQ ID NO: 10821

SEQ ID NO: 220929 - DNA, 510 bp, Canis familiaris; identical to SEQ ID NO: 10822

SEQ ID NO: 220930 - DNA, 586 bp, Canis familiaris; identical to SEQ ID NO: 10823

SEQ ID NO: 220931 - DNA, 677 bp, Canis familiaris; identical to SEQ ID NO: 10824
  misc_feature (244)..(244): n is a, c, g, or t

SEQ ID NO: 220932 - DNA, 568 bp, Canis familiaris; identical to SEQ ID NO: 10825

SEQ ID NO: 220933 - DNA, 101 bp, Canis familiaris; identical to SEQ ID NO: 10826

SEQ ID NO: 220934 - DNA, 525 bp, Canis familiaris; identical to SEQ ID NO: 10827
  misc_feature (1)..(1): n is a, c, g, or t

SEQ ID NO: 220935 - DNA, 530 bp, Canis familiaris; identical to SEQ ID NO: 10828

SEQ ID NO: 220936 - DNA, 581 bp, Canis familiaris; identical to SEQ ID NO: 10829

SEQ ID NO: 220937 - DNA, 611 bp, Canis familiaris; identical to SEQ ID NO: 10830

SEQ ID NO: 220938 - DNA, 576 bp, Canis familiaris; identical to SEQ ID NO: 10831

SEQ ID NO: 220939 - DNA, 621 bp, Canis familiaris; identical to SEQ ID NO: 10832

SEQ ID NO: 220940 - DNA, 509 bp, Canis familiaris; identical to SEQ ID NO: 10833

SEQ ID NO: 220941 - DNA, 554 bp, Canis familiaris; identical to SEQ ID NO: 10834

SEQ ID NO: 220942 - DNA, 611 bp, Canis familiaris; identical to SEQ ID NO: 10835

SEQ ID NO: 220943 - DNA, 638 bp, Canis familiaris; identical to SEQ ID NO: 10836
  misc_feature (1)..(1): n is a, c, g, or t

SEQ ID NO: 220944 - DNA, 594 bp, Canis familiaris; identical to SEQ ID NO: 10837

SEQ ID NO: 220945 - DNA, 594 bp, Canis familiaris; identical to SEQ ID NO: 10838

SEQ ID NO: 220946 - DNA, 674 bp, Canis familiaris; identical to SEQ ID NO: 10839

SEQ ID NO: 220947 - DNA, 676 bp, Canis familiaris; identical to SEQ ID NO: 10840
  misc_feature (74)..(74): n is a, c, g, or t

SEQ ID NO: 220948 - DNA, 601 bp, Canis familiaris; identical to SEQ ID NO: 10841

SEQ ID NO: 220949 - DNA, 656 bp, Canis familiaris; identical to SEQ ID NO: 10842

SEQ ID NO: 220950 - DNA, 632 bp, Canis familiaris; identical to SEQ ID NO: 10843

SEQ ID NO: 220951 - DNA, 551 bp, Canis familiaris; identical to SEQ ID NO: 10844

SEQ ID NO: 220952 - DNA, 638 bp, Canis familiaris; identical to SEQ ID NO: 10845

SEQ ID NO: 220953 - DNA, 650 bp, Canis familiaris; identical to SEQ ID NO: 10846

SEQ ID NO: 220954 - DNA, 679 bp, Canis familiaris; identical to SEQ ID NO: 10847

SEQ ID NO: 220955 - DNA, 574 bp, Canis familiaris; identical to SEQ ID NO: 10848

SEQ ID NO: 220956 - DNA, 584 bp, Canis familiaris; identical to SEQ ID NO: 10849

SEQ ID NO: 220957 - DNA, 649 bp, Canis familiaris; identical to SEQ ID NO: 10850

SEQ ID NO: 220958 - DNA, 671 bp, Canis familiaris; identical to SEQ ID NO: 10851

SEQ ID NO: 220959 - DNA, 632 bp, Canis familiaris; identical to SEQ ID NO: 10852

SEQ ID NO: 220960 - DNA, 601 bp, Canis familiaris; identical to SEQ ID NO: 10853

SEQ ID NO: 220961 - DNA, 595 bp, Canis familiaris; identical to SEQ ID NO: 10854

SEQ ID NO: 220962 - DNA, 605 bp, Canis familiaris; identical to SEQ ID NO: 10855

SEQ ID NO: 220963 - DNA, 593 bp, Canis familiaris; identical to SEQ ID NO: 10856

SEQ ID NO: 220964 - DNA, 168 bp, Canis familiaris; identical to SEQ ID NO: 10857
  misc_feature (1)..(1): n is a, c, g, or t

SEQ ID NO: 220965 - DNA, 616 bp, Canis familiaris; identical to SEQ ID NO: 10858

SEQ ID NO: 220966 - DNA, 540 bp, Canis familiaris; identical to SEQ ID NO: 10859

SEQ ID NO: 220967 - DNA, 661 bp, Canis familiaris; identical to SEQ ID NO: 10860

SEQ ID NO: 220968 - DNA, 620 bp, Canis familiaris; identical to SEQ ID NO: 10861
  misc_feature (1)..(1): n is a, c, g, or t

SEQ ID NO: 220969 - DNA, 516 bp, Canis familiaris; identical to SEQ ID NO: 10862

SEQ ID NO: 220970 - DNA, 147 bp, Canis familiaris; identical to SEQ ID NO: 10863

SEQ ID NO: 220971 - DNA, 663 bp, Canis familiaris; identical to SEQ ID NO: 10864

SEQ ID NO: 220972 - DNA, 464 bp, Canis familiaris; identical to SEQ ID NO: 10865

SEQ ID NO: 220973 - DNA, 656 bp, Canis familiaris; identical to SEQ ID NO: 10866

SEQ ID NO: 220974 - DNA, 617 bp, Canis familiaris; identical to SEQ ID NO: 10867

SEQ ID NO: 220975 - DNA, 639 bp, Canis familiaris; identical to SEQ ID NO: 10868

SEQ ID NO: 220976 - DNA, 649 bp, Canis familiaris; identical to SEQ ID NO: 10869

SEQ ID NO: 220977 - DNA, 676 bp, Canis familiaris; identical to SEQ ID NO: 10870

SEQ ID NO: 220978 - DNA, 635 bp, Canis familiaris; identical to SEQ ID NO: 10871

SEQ ID NO: 220979 - DNA, 412 bp, Canis familiaris; identical to SEQ ID NO: 10872

SEQ ID NO: 220980 - DNA, 602 bp, Canis familiaris; identical to SEQ ID NO: 10873

SEQ ID NO: 220981 - DNA, 661 bp, Canis familiaris; identical to SEQ ID NO: 10874

SEQ ID NO: 220982 - DNA, 644 bp, Canis familiaris; identical to SEQ ID NO: 10875

SEQ ID NO: 220983 - DNA, 390 bp, Canis familiaris; identical to SEQ ID NO: 10876

SEQ ID NO: 220984 - DNA, 519 bp, Canis familiaris; identical to SEQ ID NO: 10877

SEQ ID NO: 220985 - DNA, 407 bp, Canis familiaris; identical to SEQ ID NO: 10878

SEQ ID NO: 220986 - DNA, 563 bp, Canis familiaris; identical to SEQ ID NO: 10879

SEQ ID NO: 220987 - DNA, 425 bp, Canis familiaris; identical to SEQ ID NO: 10880

SEQ ID NO: 220988 - DNA, 612 bp, Canis familiaris; identical to SEQ ID NO: 10881

SEQ ID NO: 220989 - DNA, 502 bp, Canis familiaris; identical to SEQ ID NO: 10882

SEQ ID NO: 220990 - DNA, 630 bp, Canis familiaris; identical to SEQ ID NO: 10883

SEQ ID NO: 220991 - DNA, 132 bp, Canis familiaris; identical to SEQ ID NO: 10884

SEQ ID NO: 220992 - DNA, 633 bp, Canis familiaris; identical to SEQ ID NO: 10885

SEQ ID NO: 220993 - DNA, 428 bp, Canis familiaris; identical to SEQ ID NO: 10886
  misc_feature (185)..(185): n is a, c, g, or t

SEQ ID NO: 220994 - DNA, 584 bp, Canis familiaris; identical to SEQ ID NO: 10887
  misc_feature (229)..(229): n is a, c, g, or t

SEQ ID NO: 220995 - DNA, 451 bp, Canis familiaris; identical to SEQ ID NO: 10888

SEQ ID NO: 220996 - DNA, 550 bp, Canis familiaris; identical to SEQ ID NO: 10889

SEQ ID NO: 220997 - DNA, 596 bp, Canis familiaris; identical to SEQ ID NO: 10890

SEQ ID NO: 220998 - DNA, 513 bp, Canis familiaris; identical to SEQ ID NO: 10891

SEQ ID NO: 220999 - DNA, 633 bp, Canis familiaris; identical to SEQ ID NO: 10892
  misc_feature (215)..(215): n is a, c, g, or t

SEQ ID NO: 221000 - DNA, 606 bp, Canis familiaris; identical to SEQ ID NO: 10893

SEQ ID NO: 221001 - DNA, 617 bp, Canis familiaris; identical to SEQ ID NO: 10894

SEQ ID NO: 221002 - DNA, 613 bp, Canis familiaris; identical to SEQ ID NO: 10895

SEQ ID NO: 221003 - DNA, 615 bp, Canis familiaris; identical to SEQ ID NO: 10896

SEQ ID NO: 221004 - DNA, 653 bp, Canis familiaris; identical to SEQ ID NO: 10897

SEQ ID NO: 221005 - DNA, 343 bp, Canis familiaris; identical to SEQ ID NO: 10898

SEQ ID NO: 221006 - DNA, 498 bp, Canis familiaris; identical to SEQ ID NO: 10899
  misc_feature (26)..(26): n is a, c, g, or t
  misc_feature (84)..(85): n is a, c, g, or t
  misc_feature (195)..(195): n is a, c, g, or t

SEQ ID NO: 221007 - DNA, 701 bp, Canis familiaris; identical to SEQ ID NO: 10900
  misc_feature (1)..(1): n is a, c, g, or t

SEQ ID NO: 221008 - DNA, 542 bp, Canis familiaris; identical to SEQ ID NO: 10901

SEQ ID NO: 221009 - DNA, 626 bp, Canis familiaris; identical to SEQ ID NO: 10902

SEQ ID NO: 221010 - DNA, 609 bp, Canis familiaris; identical to SEQ ID NO: 10903

SEQ ID NO: 221011 - DNA, 589 bp, Canis familiaris; identical to SEQ ID NO: 10904
  misc_feature (247)..(247): n is a, c, g, or t

SEQ ID NO: 221012 - DNA, 625 bp, Canis familiaris; identical to SEQ ID NO: 10905

SEQ ID NO: 221013 - DNA, 604 bp, Canis familiaris; identical to SEQ ID NO: 10906

SEQ ID NO: 221014 - DNA, 663 bp, Canis familiaris; identical to SEQ ID NO: 10907
  misc_feature (1)..(1): n is a, c, g, or t

SEQ ID NO: 221015 - DNA, 598 bp, Canis familiaris; identical to SEQ ID NO: 10908

SEQ ID NO: 221016 - DNA, 546 bp, Canis familiaris; identical to SEQ ID NO: 10909

SEQ ID NO: 221017 - DNA, 662 bp, Canis familiaris; identical to SEQ ID NO: 10910
  misc_feature (112)..(112): n is a, c, g, or t
  misc_feature (114)..(114): n is a, c, g, or t

SEQ ID NO: 221018 - DNA, 600 bp, Canis familiaris; identical to SEQ ID NO: 10911

SEQ ID NO: 221019 - DNA, 562 bp, Canis familiaris; identical to SEQ ID NO: 10912

SEQ ID NO: 221020 - DNA, 373 bp, Canis familiaris; identical to SEQ ID NO: 10913

SEQ ID NO: 221021 - DNA, 567 bp, Canis familiaris; identical to SEQ ID NO: 10914
  misc_feature (253)..(253): n is a, c, g, or t

SEQ ID NO: 221022 - DNA, 659 bp, Canis familiaris; identical to SEQ ID NO: 10915

SEQ ID NO: 221023 - DNA, 651 bp, Canis familiaris; identical to SEQ ID NO: 10916
  misc_feature (371)..(371): n is a, c, g, or t

SEQ ID NO: 221024 - DNA, 670 bp, Canis familiaris; identical to SEQ ID NO: 10917
  misc_feature (557)..(557): n is a, c, g, or t

SEQ ID NO: 221025 - DNA, 573 bp, Canis familiaris; identical to SEQ ID NO: 10918
  misc_feature (1)..(1): n is a, c, g, or t

SEQ ID NO: 221026 - DNA, 104 bp, Canis familiaris; identical to SEQ ID NO: 10919

SEQ ID NO: 221027 - DNA, 439 bp, Canis familiaris; identical to SEQ ID NO: 10920

SEQ ID NO: 221028 - DNA, 304 bp, Canis familiaris; identical to SEQ ID NO: 10921
  misc_feature (121)..(121): n is a, c, g, or t
  misc_feature (131)..(131): n is a, c, g, or t
  misc_feature (146)..(146): n is a, c, g, or t
  misc_feature (160)..(160): n is a, c, g, or t

SEQ ID NO: 221029 - DNA, 532 bp, Canis familiaris; identical to SEQ ID NO: 10922
  misc_feature (50)..(51): n is a, c, g, or t
  misc_feature (199)..(202): n is a, c, g, or t

SEQ ID NO: 221030 - DNA, 130 bp, Canis familiaris; identical to SEQ ID NO: 10923

SEQ ID NO: 221031 - DNA, 603 bp, Canis familiaris; identical to SEQ ID NO: 10924

SEQ ID NO: 221032 - DNA, 562 bp, Canis familiaris; identical to SEQ ID NO: 10925

SEQ ID NO: 221033 - DNA, 708 bp, Canis familiaris; identical to SEQ ID NO: 10926

SEQ ID NO: 221034 - DNA, 457 bp, Canis familiaris; identical to SEQ ID NO: 10927

SEQ ID NO: 221035 - DNA, 602 bp, Canis familiaris; identical to SEQ ID NO: 10928

SEQ ID NO: 221036 - DNA, 471 bp, Canis familiaris; identical to SEQ ID NO: 10929

SEQ ID NO: 221037 - DNA, 649 bp, Canis familiaris; identical to SEQ ID NO: 10930

SEQ ID NO: 221038 - DNA, 572 bp, Canis familiaris; identical to SEQ ID NO: 10931
  misc_feature (1)..(1): n is a, c, g, or t

SEQ ID NO: 221039 - DNA, 631 bp, Canis familiaris; identical to SEQ ID NO: 10932

SEQ ID NO: 221040 - DNA, 699 bp, Canis familiaris; identical to SEQ ID NO: 10933

SEQ ID NO: 221041 - DNA, 666 bp, Canis familiaris; identical to SEQ ID NO: 10934

SEQ ID NO: 221042 - DNA, 556 bp, Canis familiaris; identical to SEQ ID NO: 10935

SEQ ID NO: 221043 - DNA, 627 bp, Canis familiaris; identical to SEQ ID NO: 10936

SEQ ID NO: 221044 - DNA, 613 bp, Canis familiaris; identical to SEQ ID NO: 10937

SEQ ID NO: 221045 - DNA, 615 bp, Canis familiaris; identical to SEQ ID NO: 10938

SEQ ID NO: 221046 - DNA, 691 bp, Canis familiaris; identical to SEQ ID NO: 10939

SEQ ID NO: 221047 - DNA, 557 bp, Canis familiaris; identical to SEQ ID NO: 10940

SEQ ID NO: 221048 - DNA, 521 bp, Canis familiaris; identical to SEQ ID NO: 10941

SEQ ID NO: 221049 - DNA, 535 bp, Canis familiaris; identical to SEQ ID NO: 10942

SEQ ID NO: 221050 - DNA, 611 bp, Canis familiaris; identical to SEQ ID NO: 10943

SEQ ID NO: 221051 - DNA, 562 bp, Canis familiaris; identical to SEQ ID NO: 10944

SEQ ID NO: 221052 - DNA, 602 bp, Canis familiaris; identical to SEQ ID NO: 10945
  misc_feature (1)..(1): n is a, c, g, or t

SEQ ID NO: 221053 - DNA, 564 bp, Canis familiaris; identical to SEQ ID NO: 10946

SEQ ID NO: 221054 - DNA, 592 bp, Canis familiaris; identical to SEQ ID NO: 10947

SEQ ID NO: 221055 - DNA, 635 bp, Canis familiaris; identical to SEQ ID NO: 10948

SEQ ID NO: 221056 - DNA, 289 bp, Canis familiaris; identical to SEQ ID NO: 10949

SEQ ID NO: 221057 - DNA, 574 bp, Canis familiaris; identical to SEQ ID NO: 10950

SEQ ID NO: 221058 - DNA, 628 bp, Canis familiaris; identical to SEQ ID NO: 10951
  misc_feature (400)..(400): n is a, c, g, or t

SEQ ID NO: 221059 - DNA, 680 bp, Canis familiaris; identical to SEQ ID NO: 10952

SEQ ID NO: 221060 - DNA, 587 bp, Canis familiaris; identical to SEQ ID NO: 10953

SEQ ID NO: 221061 - DNA, 482 bp, Canis familiaris; identical to SEQ ID NO: 10954

SEQ ID NO: 221062 - DNA, 692 bp, Canis familiaris; identical to SEQ ID NO: 10955

SEQ ID NO: 221063 - DNA, 664 bp, Canis familiaris; identical to SEQ ID NO: 10956

SEQ ID NO: 221064 - DNA, 313 bp, Canis familiaris; identical to SEQ ID NO: 10957

SEQ ID NO: 221065 - DNA, 685 bp, Canis familiaris; identical to SEQ ID NO: 10958

SEQ ID NO: 221066 - DNA, 627 bp, Canis familiaris; identical to SEQ ID NO: 10959

SEQ ID NO: 221067 - DNA, 537 bp, Canis familiaris; identical to SEQ ID NO: 10960

SEQ ID NO: 221068 - DNA, 589 bp, Canis familiaris; identical to SEQ ID NO: 10961
  misc_feature (108)..(108): n is a, c, g, or t

SEQ ID NO: 221069 - DNA, 262 bp, Canis familiaris; identical to SEQ ID NO: 10962

SEQ ID NO: 221070 - DNA, 799 bp, Canis familiaris; identical to SEQ ID NO: 10963
  misc_feature (229)..(229): n is a, c, g, or t
  misc_feature (467)..(467): n is a, c, g, or t

SEQ ID NO: 221071 - DNA, 584 bp, Canis familiaris; identical to SEQ ID NO: 10964

SEQ ID NO: 221072 - DNA, 650 bp, Canis familiaris; identical to SEQ ID NO: 10965

SEQ ID NO: 221073 - DNA, 673 bp, Canis familiaris; identical to SEQ ID NO: 10966
  misc_feature (274)..(274): n is a, c, g, or t
  misc_feature (290)..(290): n is a, c, g, or t

SEQ ID NO: 221074 - DNA, 619 bp, Canis familiaris; identical to SEQ ID NO: 10967

SEQ ID NO: 221075 - DNA, 719 bp, Canis familiaris; identical to SEQ ID NO: 10968

SEQ ID NO: 221076 - DNA, 717 bp, Canis familiaris; identical to SEQ ID NO: 10969

SEQ ID NO: 221077 - DNA, 527 bp, Canis familiaris; identical to SEQ ID NO: 10970

SEQ ID NO: 221078 - DNA, 603 bp, Canis familiaris; identical to SEQ ID NO: 10971
  misc_feature (1)..(1): n is a, c, g, or t

SEQ ID NO: 221079 - DNA, 671 bp, Canis familiaris; identical to SEQ ID NO: 10972

SEQ ID NO: 221080 - DNA, 615 bp, Canis familiaris; identical to SEQ ID NO: 10973
  misc_feature (1)..(1): n is a, c, g, or t
  misc_feature (78)..(78): n is a, c, g, or t

SEQ ID NO: 221081 - DNA, 638 bp, Canis familiaris; identical to SEQ ID NO: 10974

SEQ ID NO: 221082 - DNA, 621 bp, Canis familiaris; identical to SEQ ID NO: 10975
  misc_feature (51)..(51): n is a, c, g, or t

SEQ ID NO: 221083 - DNA, 605 bp, Canis familiaris; identical to SEQ ID NO: 10976

SEQ ID NO: 221084 - DNA, 650 bp, Canis familiaris; identical to SEQ ID NO: 10977
  misc_feature (56)..(56): n is a, c, g, or t

SEQ ID NO: 221085 - DNA, 634 bp, Canis familiaris; identical to SEQ ID NO: 10978

SEQ ID NO: 221086 - DNA, 625 bp, Canis familiaris; identical to SEQ ID NO: 10979
  misc_feature (207)..(207): n is a, c, g, or t

SEQ ID NO: 221087 - DNA, 512 bp, Canis familiaris; identical to SEQ ID NO: 10980

SEQ ID NO: 221088 - DNA, 543 bp, Canis familiaris; identical to SEQ ID NO: 10981

SEQ ID NO: 221089 - DNA, 665 bp, Canis familiaris; identical to SEQ ID NO: 10982

SEQ ID NO: 221090 - DNA, 697 bp, Canis familiaris; identical to SEQ ID NO: 10983

SEQ ID NO: 221091 - DNA, 576 bp, Canis familiaris; identical to SEQ ID NO: 10984

SEQ ID NO: 221092 - DNA, 550 bp, Canis familiaris; identical to SEQ ID NO: 10985

SEQ ID NO: 221093 - DNA, 466 bp, Canis familiaris; identical to SEQ ID NO: 10986

SEQ ID NO: 221094 - DNA, 470 bp, Canis familiaris; identical to SEQ ID NO: 10987
  misc_feature (11)..(11): n is a, c, g, or t
  misc_feature (32)..(32): n is a, c, g, or t
  misc_feature (48)..(48): n is a, c, g, or t

SEQ ID NO: 221095 - DNA, 539 bp, Canis familiaris; identical to SEQ ID NO: 10988

SEQ ID NO: 221096 - DNA, 631 bp, Canis familiaris; identical to SEQ ID NO: 10989

SEQ ID NO: 221097 - DNA, 576 bp, Canis familiaris; identical to SEQ ID NO: 10990

SEQ ID NO: 221098 - DNA, 589 bp, Canis familiaris; identical to SEQ ID NO: 10991

SEQ ID NO: 221099 - DNA, 654 bp, Canis familiaris; identical to SEQ ID NO: 10992

SEQ ID NO: 221100 - DNA, 587 bp, Canis familiaris; identical to SEQ ID NO: 10993

SEQ ID NO: 221101 - DNA, 633 bp, Canis familiaris; identical to SEQ ID NO: 10994

SEQ ID NO: 221102 - DNA, 589 bp, Canis familiaris; identical to SEQ ID NO: 10995

SEQ ID NO: 221103 - DNA, 311 bp, Canis familiaris; identical to SEQ ID NO: 10996

SEQ ID NO: 221104 - DNA, 607 bp, Canis familiaris; identical to SEQ ID NO: 10997
  misc_feature (421)..(421): n is a, c, g, or t

SEQ ID NO: 221105 - DNA, 577 bp, Canis familiaris; identical to SEQ ID NO: 10998

SEQ ID NO: 221106 - DNA, 615 bp, Canis familiaris; identical to SEQ ID NO: 10999

SEQ ID NO: 221107 - DNA, 577 bp, Canis familiaris; identical to SEQ ID NO: 11000
  misc_feature (551)..(551): n is a, c, g, or t

SEQ ID NO: 221108 - DNA, 608 bp, Canis familiaris; identical to SEQ ID NO: 11001

SEQ ID NO: 221109 - DNA, 618 bp, Canis familiaris; identical to SEQ ID NO: 11002

SEQ ID NO: 221110 - DNA, 504 bp, Canis familiaris; identical to SEQ ID NO: 11003

SEQ ID NO: 221111 - DNA, 366 bp, Canis familiaris; identical to SEQ ID NO: 11004

SEQ ID NO: 221112 - DNA, 601 bp, Canis familiaris; identical to SEQ ID NO: 11005

SEQ ID NO: 221113 - DNA, 667 bp, Canis familiaris; identical to SEQ ID NO: 11006

SEQ ID NO: 221114 - DNA, 569 bp, Canis familiaris; identical to SEQ ID NO: 11007
  misc_feature (536)..(536): n is a, c, g, or t

SEQ ID NO: 221115 - DNA, 622 bp, Canis familiaris; identical to SEQ ID NO: 11008

SEQ ID NO: 221116 - DNA, 640 bp, Canis familiaris; identical to SEQ ID NO: 11009

SEQ ID NO: 221117 - DNA, 437 bp, Canis familiaris; identical to SEQ ID NO: 11010

SEQ ID NO: 221118 - DNA, 616 bp, Canis familiaris; identical to SEQ ID NO: 11011

SEQ ID NO: 221119 - DNA, 692 bp, Canis familiaris; identical to SEQ ID NO: 11012

SEQ ID NO: 221120 - DNA, 545 bp, Canis familiaris; identical to SEQ ID NO: 11013

SEQ ID NO: 221121 - DNA, 671 bp, Canis familiaris; identical to SEQ ID NO: 11014

SEQ ID NO: 221122 - DNA, 549 bp, Canis familiaris; identical to SEQ ID NO: 11015

SEQ ID NO: 221123 - DNA, 675 bp, Canis familiaris; identical to SEQ ID NO: 11016

SEQ ID NO: 221124 - DNA, 633 bp, Canis familiaris; identical to SEQ ID NO: 11017

SEQ ID NO: 221125 - DNA, 565 bp, Canis familiaris; identical to SEQ ID NO: 11018

SEQ ID NO: 221126 - DNA, 614 bp, Canis familiaris; identical to SEQ ID NO: 11019

SEQ ID NO: 221127 - DNA, 556 bp, Canis familiaris; identical to SEQ ID NO: 11020
  misc_feature (39)..(39): n is a, c, g, or t

SEQ ID NO: 221128 - DNA, 571 bp, Canis familiaris; identical to SEQ ID NO: 11021

SEQ ID NO: 221129 - DNA, 723 bp, Canis familiaris; identical to SEQ ID NO: 11022

SEQ ID NO: 221130 - DNA, 612 bp, Canis familiaris; identical to SEQ ID NO: 11023

SEQ ID NO: 221131 - DNA, 567 bp, Canis familiaris; identical to SEQ ID NO: 11024

SEQ ID NO: 221132 - DNA, 600 bp, Canis familiaris; identical to SEQ ID NO: 11025

SEQ ID NO: 221133 - DNA, 504 bp, Canis familiaris; identical to SEQ ID NO: 11026

SEQ ID NO: 221134 - DNA, 545 bp, Canis familiaris; identical to SEQ ID NO: 11027

SEQ ID NO: 221135 - DNA, 466 bp, Canis familiaris; identical to SEQ ID NO: 11028

SEQ ID NO: 221136 - DNA, 697 bp, Canis familiaris; identical to SEQ ID NO: 11029
  misc_feature (120)..(120): n is a, c, g, or t

SEQ ID NO: 221137 - DNA, 537 bp, Canis familiaris; identical to SEQ ID NO: 11030

SEQ ID NO: 221138 - DNA, 476 bp, Canis familiaris; identical to SEQ ID NO: 11031

SEQ ID NO: 221139 - DNA, 479 bp, Canis familiaris; identical to SEQ ID NO: 11032

SEQ ID NO: 221140 - DNA, 585 bp, Canis familiaris; identical to SEQ ID NO: 11033
  misc_feature (170)..(170): n is a, c, g, or t
  misc_feature (181)..(181): n is a, c, g, or t
  misc_feature (289)..(289): n is a, c, g, or t
  misc_feature (300)..(300): n is a, c, g, or t

SEQ ID NO: 221141 - DNA, 608 bp, Canis familiaris; identical to SEQ ID NO: 11034

SEQ ID NO: 221142 - DNA, 625 bp, Canis familiaris; identical to SEQ ID NO: 11035

SEQ ID NO: 221143 - DNA, 662 bp, Canis familiaris; identical to SEQ ID NO: 11036
  misc_feature (3)..(3): n is a, c, g, or t
  misc_feature (160)..(160): n is a, c, g, or t

SEQ ID NO: 221144 - DNA, 679 bp, Canis familiaris; identical to SEQ ID NO: 11037
  misc_feature (203)..(203): n is a, c, g, or t

SEQ ID NO: 221145 - DNA, 508 bp, Canis familiaris; identical to SEQ ID NO: 11038

SEQ ID NO: 221146 - DNA, 644 bp, Canis familiaris; identical to SEQ ID NO: 11039
  misc_feature (421)..(421): n is a, c, g, or t

SEQ ID NO: 221147 - DNA, 701 bp, Canis familiaris; identical to SEQ ID NO: 11040

SEQ ID NO: 221148 - DNA, 321 bp, Canis familiaris; identical to SEQ ID NO: 11041

SEQ ID NO: 221149 - DNA, 556 bp, Canis familiaris; identical to SEQ ID NO: 11042
  misc_feature (1)..(1): n is a, c, g, or t

SEQ ID NO: 221150 - DNA, 686 bp, Canis familiaris; identical to SEQ ID NO: 11043

SEQ ID NO: 221151 - DNA, 618 bp, Canis familiaris; identical to SEQ ID NO: 11044

SEQ ID NO: 221152 - DNA, 585 bp, Canis familiaris; identical to SEQ ID NO: 11045

SEQ ID NO: 221153 - DNA, 627 bp, Canis familiaris; identical to SEQ ID NO: 11046

SEQ ID NO: 221154 - DNA, 592 bp, Canis familiaris; identical to SEQ ID NO: 11047

SEQ ID NO: 221155 - DNA, 611 bp, Canis familiaris; identical to SEQ ID NO: 11048

SEQ ID NO: 221156 - DNA, 593 bp, Canis familiaris; identical to SEQ ID NO: 11049
  misc_feature (231)..(231): n is a, c, g, or t

SEQ ID NO: 221157 - DNA, 654 bp, Canis familiaris; identical to SEQ ID NO: 11050
  misc_feature (1)..(1): n is a, c, g, or t
  misc_feature (116)..(116): n is a, c, g, or t

SEQ ID NO: 221158 - DNA, 571 bp, Canis familiaris; identical to SEQ ID NO: 11051

SEQ ID NO: 221159 - DNA, 596 bp, Canis familiaris; identical to SEQ ID NO: 11052

SEQ ID NO: 221160 - DNA, 99 bp, Canis familiaris; identical to SEQ ID NO: 11053

SEQ ID NO: 221161 - DNA, 626 bp, Canis familiaris; identical to SEQ ID NO: 11054

SEQ ID NO: 221162 - DNA, 597 bp, Canis familiaris; identical to SEQ ID NO: 11055

SEQ ID NO: 221163 - DNA, 501 bp, Canis familiaris; identical to SEQ ID NO: 11056

SEQ ID NO: 221164 - DNA, 548 bp, Canis familiaris; identical to SEQ ID NO: 11057

SEQ ID NO: 221165 - DNA, 670 bp, Canis familiaris; identical to SEQ ID NO: 11058
  misc_feature (1)..(1): n is a, c, g, or t

SEQ ID NO: 221166 - DNA, 622 bp, Canis familiaris; identical to SEQ ID NO: 11059

SEQ ID NO: 221167 - DNA, 616 bp, Canis familiaris; identical to SEQ ID NO: 11060

SEQ ID NO: 221168 - DNA, 629 bp, Canis familiaris; identical to SEQ ID NO: 11061

SEQ ID NO: 221169 - DNA, 663 bp, Canis familiaris; identical to SEQ ID NO: 11062

SEQ ID NO: 221170 - DNA, 645 bp, Canis familiaris; identical to SEQ ID NO: 11063

SEQ ID NO: 221171 - DNA, 646 bp, Canis familiaris; identical to SEQ ID NO: 11064

SEQ ID NO: 221172 - DNA, 539 bp, Canis familiaris; identical to SEQ ID NO: 11065

SEQ ID NO: 221173 - DNA, 579 bp, Canis familiaris; identical to SEQ ID NO: 11066

SEQ ID NO: 221174 - DNA, 596 bp, Canis familiaris; identical to SEQ ID NO: 11067

SEQ ID NO: 221175 - DNA, 691 bp, Canis familiaris; identical to SEQ ID NO: 11068

SEQ ID NO: 221176 - DNA, 630 bp, Canis familiaris; identical to SEQ ID NO: 11069
  misc_feature (65)..(65): n is a, c, g, or t

SEQ ID NO: 221177 - DNA, 555 bp, Canis familiaris; identical to SEQ ID NO: 11070

SEQ ID NO: 221178 - DNA, 432 bp, Canis familiaris; identical to SEQ ID NO: 11071

SEQ ID NO: 221179 - DNA, 644 bp, Canis familiaris; identical to SEQ ID NO: 11072

SEQ ID NO: 221180 - DNA, 445 bp, Canis familiaris; identical to SEQ ID NO: 11073

SEQ ID NO: 221181 - DNA, 146 bp, Canis familiaris; identical to SEQ ID NO: 11074
  misc_feature (1)..(1): n is a, c, g, or t

SEQ ID NO: 221182 - DNA, 562 bp, Canis familiaris; identical to SEQ ID NO: 11075
  misc_feature (3)..(3): n is a, c, g, or t

SEQ ID NO: 221183 - DNA, 738 bp, Canis familiaris; identical to SEQ ID NO: 11076
  misc_feature (176)..(176): n is a, c, g, or t

SEQ ID NO: 221184 - DNA, 182 bp, Canis familiaris; identical to SEQ ID NO: 11077

SEQ ID NO: 221185 - DNA, 580 bp, Canis familiaris; identical to SEQ ID NO: 11078

SEQ ID NO: 221186 - DNA, 613 bp, Canis familiaris; identical to SEQ ID NO: 11079

SEQ ID NO: 221187 - DNA, 693 bp, Canis familiaris; identical to SEQ ID NO: 11080

SEQ ID NO: 221188 - DNA, 605 bp, Canis familiaris; identical to SEQ ID NO: 11081

SEQ ID NO: 221189 - DNA, 624 bp, Canis familiaris; identical to SEQ ID NO: 11082

SEQ ID NO: 221190 - DNA, 255 bp, Canis familiaris; identical to SEQ ID NO: 11083

SEQ ID NO: 221191 - DNA, 576 bp, Canis familiaris; identical to SEQ ID NO: 11084

SEQ ID NO: 221192 - DNA, 713 bp, Canis familiaris; identical to SEQ ID NO: 11085

SEQ ID NO: 221193 - DNA, 663 bp, Canis familiaris; identical to SEQ ID NO: 11086
  misc_feature (1)..(1): n is a, c, g, or t
  misc_feature (394)..(394): n is a, c, g, or t

SEQ ID NO: 221194 - DNA, 602 bp, Canis familiaris; identical to SEQ ID NO: 11087

SEQ ID NO: 221195 - DNA, 641 bp, Canis familiaris; identical to SEQ ID NO: 11088

SEQ ID NO: 221196 - DNA, 627 bp, Canis familiaris; identical to SEQ ID NO: 11089
  misc_feature (153)..(153): n is a, c, g, or t
  misc_feature (478)..(478): n is a, c, g, or t

SEQ ID NO: 221197 - DNA, 697 bp, Canis familiaris; identical to SEQ ID NO: 11090

SEQ ID NO: 221198 - DNA, 130 bp, Canis familiaris; identical to SEQ ID NO: 11091

SEQ ID NO: 221199 - DNA, 640 bp, Canis familiaris; identical to SEQ ID NO: 11092
  misc_feature (1)..(1): n is a, c, g, or t
  misc_feature (39)..(39): n is a, c, g, or t

SEQ ID NO: 221200 - DNA, 528 bp, Canis familiaris; identical to SEQ ID NO: 11093
  misc_feature (120)..(120): n is a, c, g, or t
  misc_feature (162)..(162): n is a, c, g, or t

SEQ ID NO: 221201 - DNA, 546 bp, Canis familiaris; identical to SEQ ID NO: 11094

SEQ ID NO: 221202 - DNA, 595 bp, Canis familiaris; identical to SEQ ID NO: 11095
  misc_feature (80)..(80): n is a, c, g, or t

SEQ ID NO: 221203 - DNA, 622 bp, Canis familiaris; identical to SEQ ID NO: 11096

SEQ ID NO: 221204 - DNA, 735 bp, Canis familiaris; identical to SEQ ID NO: 11097

SEQ ID NO: 221205 - DNA, 585 bp, Canis familiaris; identical to SEQ ID NO: 11098
  misc_feature (1)..(1): n is a, c, g, or t

SEQ ID NO: 221206 - DNA, 599 bp, Canis familiaris; identical to SEQ ID NO: 11099

SEQ ID NO: 221207 - DNA, 664 bp, Canis familiaris; identical to SEQ ID NO: 11100

SEQ ID NO: 221208 - DNA, 608 bp, Canis familiaris; identical to SEQ ID NO: 11101

SEQ ID NO: 221209 - DNA, 674 bp, Canis familiaris; identical to SEQ ID NO: 11102

SEQ ID NO: 221210 - DNA, 159 bp, Canis familiaris; identical to SEQ ID NO: 11103

SEQ ID NO: 221211 - DNA, 621 bp, Canis familiaris; identical to SEQ ID NO: 11104

SEQ ID NO: 221212 - DNA, 603 bp, Canis familiaris; identical to SEQ ID NO: 11105

SEQ ID NO: 221213 - DNA, 640 bp, Canis familiaris; identical to SEQ ID NO: 11106

SEQ ID NO: 221214 - DNA, 634 bp, Canis familiaris; identical to SEQ ID NO: 11107

SEQ ID NO: 221215 - DNA, 546 bp, Canis familiaris; identical to SEQ ID NO: 11108
  misc_feature (169)..(169): n is a, c, g, or t
  misc_feature (221)..(221): n is a, c, g, or t

SEQ ID NO: 221216 - DNA, 631 bp, Canis familiaris; identical to SEQ ID NO: 11109
  misc_feature (130)..(130): n is a, c, g, or t
  misc_feature (237)..(237): n is a, c, g, or t

SEQ ID NO: 221217 - DNA, 474 bp, Canis familiaris; identical to SEQ ID NO: 11110

SEQ ID NO: 221218 - DNA, 623 bp, Canis familiaris; identical to SEQ ID NO: 11111

SEQ ID NO: 221219 - DNA, 598 bp, Canis familiaris; identical to SEQ ID NO: 11112

SEQ ID NO: 221220 - DNA, 179 bp, Canis familiaris; identical to SEQ ID NO: 11113

SEQ ID NO: 221221 - DNA, 525 bp, Canis familiaris; identical to SEQ ID NO: 11114

SEQ ID NO: 221222 - DNA, 615 bp, Canis familiaris; identical to SEQ ID NO: 11115

SEQ ID NO: 221223 - DNA, 592 bp, Canis familiaris; identical to SEQ ID NO: 11116

SEQ ID NO: 221224 - DNA, 646 bp, Canis familiaris; identical to SEQ ID NO: 11117

SEQ ID NO: 221225 - DNA, 587 bp, Canis familiaris; identical to SEQ ID NO: 11118

SEQ ID NO: 221226 - DNA, 583 bp, Canis familiaris; identical to SEQ ID NO: 11119

SEQ ID NO: 221227 - DNA, 638 bp, Canis familiaris; identical to SEQ ID NO: 11120

SEQ ID NO: 221228 - DNA, 347 bp, Canis familiaris; identical to SEQ ID NO: 11121

SEQ ID NO: 221229 - DNA, 571 bp, Canis familiaris; identical to SEQ ID NO: 11122

SEQ ID NO: 221230 - DNA, 593 bp, Canis familiaris; identical to SEQ ID NO: 11123

SEQ ID NO: 221231 - DNA, 639 bp, Canis familiaris; identical to SEQ ID NO: 11124

SEQ ID NO: 221232 - DNA, 587 bp, Canis familiaris; identical to SEQ ID NO: 11125

SEQ ID NO: 221233 - DNA, 488 bp, Canis familiaris; identical to SEQ ID NO: 11126

SEQ ID NO: 221234 - DNA, 437 bp, Canis familiaris; identical to SEQ ID NO: 11127

SEQ ID NO: 221235 - DNA, 598 bp, Canis familiaris; identical to SEQ ID NO: 11128

SEQ ID NO: 221236 - DNA, 552 bp, Canis familiaris; identical to SEQ ID NO: 11129

SEQ ID NO: 221237 - DNA, 688 bp, Canis familiaris; identical to SEQ ID NO: 11130

SEQ ID NO: 221238 - DNA, 695 bp, Canis familiaris; identical to SEQ ID NO: 11131

SEQ ID NO: 221239 - DNA, 635 bp, Canis familiaris; identical to SEQ ID NO: 11132

SEQ ID NO: 221240 - DNA, 668 bp, Canis familiaris; identical to SEQ ID NO: 11133
  misc_feature (11)..(11): n is a, c, g, or t

SEQ ID NO: 221241 - DNA, 683 bp, Canis familiaris; identical to SEQ ID NO: 11134

SEQ ID NO: 221242 - DNA, 613 bp, Canis familiaris; identical to SEQ ID NO: 11135

SEQ ID NO: 221243 - DNA, 612 bp, Canis familiaris; identical to SEQ ID NO: 11136

SEQ ID NO: 221244 - DNA, 531 bp, Canis familiaris; identical to SEQ ID NO: 11137
  misc_feature (412)..(412): n is a, c, g, or t

SEQ ID NO: 221245 - DNA, 658 bp, Canis familiaris; identical to SEQ ID NO: 11138

SEQ ID NO: 221246 - DNA, 255 bp, Canis familiaris; identical to SEQ ID NO: 11139

SEQ ID NO: 221247 - DNA, 645 bp, Canis familiaris; identical to SEQ ID NO: 11140

SEQ ID NO: 221248 - DNA, 728 bp, Canis familiaris; identical to SEQ ID NO: 11141
  misc_feature (187)..(187): n is a, c, g, or t

SEQ ID NO: 221249 - DNA, 379 bp, Canis familiaris; identical to SEQ ID NO: 11142

SEQ ID NO: 221250 - DNA, 582 bp, Canis familiaris; identical to SEQ ID NO: 11143

SEQ ID NO: 221251 - DNA, 633 bp, Canis familiaris; identical to SEQ ID NO: 11144

SEQ ID NO: 221252 - DNA, 620 bp, Canis familiaris; identical to SEQ ID NO: 11145

SEQ ID NO: 221253 - DNA, 640 bp, Canis familiaris; identical to SEQ ID NO: 11146
  misc_feature (182)..(182): n is a, c, g, or t

SEQ ID NO: 221254 - DNA, 591 bp, Canis familiaris; identical to SEQ ID NO: 11147
  misc_feature (13)..(13): n is a, c, g, or t

SEQ ID NO: 221255 - DNA, 630 bp, Canis familiaris; identical to SEQ ID NO: 11148

SEQ ID NO: 221256 - DNA, 609 bp, Canis familiaris; identical to SEQ ID NO: 11149

SEQ ID NO: 221257 - DNA, 612 bp, Canis familiaris; identical to SEQ ID NO: 11150

SEQ ID NO: 221258 - DNA, 580 bp, Canis familiaris; identical to SEQ ID NO: 11151

SEQ ID NO: 221259 - DNA, 561 bp, Canis familiaris; identical to SEQ ID NO: 11152

SEQ ID NO: 221260 - DNA, 589 bp, Canis familiaris; identical to SEQ ID NO: 11153

SEQ ID NO: 221261 - DNA, 634 bp, Canis familiaris; identical to SEQ ID NO: 11154

SEQ ID NO: 221262 - DNA, 594 bp, Canis familiaris; identical to SEQ ID NO: 11155

SEQ ID NO: 221263 - DNA, 463 bp, Canis familiaris; identical to SEQ ID NO: 11156
  misc_feature (1)..(1): n is a, c, g, or t

SEQ ID NO: 221264 - DNA, 622 bp, Canis familiaris; identical to SEQ ID NO: 11157

SEQ ID NO: 221265 - DNA, 590 bp, Canis familiaris; identical to SEQ ID NO: 11158

SEQ ID NO: 221266 - DNA, 617 bp, Canis familiaris; identical to SEQ ID NO: 11159

SEQ ID NO: 221267 - DNA, 565 bp, Canis familiaris; identical to SEQ ID NO: 11160

SEQ ID NO: 221268 - DNA, 681 bp, Canis familiaris; identical to SEQ ID NO: 11161
  misc_feature (1)..(1): n is a, c, g, or t

SEQ ID NO: 221269 - DNA, 687 bp, Canis familiaris; identical to SEQ ID NO: 11162

SEQ ID NO: 221270 - DNA, 510 bp, Canis familiaris; identical to SEQ ID NO: 11163

SEQ ID NO: 221271 - DNA, 582 bp, Canis familiaris; identical to SEQ ID NO: 11164

SEQ ID NO: 221272 - DNA, 492 bp, Canis familiaris; identical to SEQ ID NO: 11165

SEQ ID NO: 221273 - DNA, 165 bp, Canis familiaris; identical to SEQ ID NO: 11166

SEQ ID NO: 221274 - DNA, 623 bp, Canis familiaris; identical to SEQ ID NO: 11167

SEQ ID NO: 221275 - DNA, 612 bp, Canis familiaris; identical to SEQ ID NO: 11168

SEQ ID NO: 221276 - DNA, 561 bp, Canis familiaris; identical to SEQ ID NO: 11169

SEQ ID NO: 221277 - DNA, 632 bp, Canis familiaris; identical to SEQ ID NO: 11170
  misc_feature (238)..(238): n is a, c, g, or t

SEQ ID NO: 221278 - DNA, 599 bp, Canis familiaris; identical to SEQ ID NO: 11171

SEQ ID NO: 221279 - DNA, 623 bp, Canis familiaris; identical to SEQ ID NO: 11172

SEQ ID NO: 221280 - DNA, 653 bp, Canis familiaris; identical to SEQ ID NO: 11173
  misc_feature (1)..(1): n is a, c, g, or t

SEQ ID NO: 221281 - DNA, 586 bp, Canis familiaris; identical to SEQ ID NO: 11174

SEQ ID NO: 221282 - DNA, 668 bp, Canis familiaris; identical to SEQ ID NO: 11175

SEQ ID NO: 221283 - DNA, 669 bp, Canis familiaris; identical to SEQ ID NO: 11176

SEQ ID NO: 221284 - DNA, 714 bp, Canis familiaris; identical to SEQ ID NO: 11177

SEQ ID NO: 221285 - DNA, 619 bp, Canis familiaris; identical to SEQ ID NO: 11178

SEQ ID NO: 221286 - DNA, 598 bp, Canis familiaris; identical to SEQ ID NO: 11179

SEQ ID NO: 221287 - DNA, 625 bp, Canis familiaris; identical to SEQ ID NO: 11180

SEQ ID NO: 221288 - DNA, 564 bp, Canis familiaris; identical to SEQ ID NO: 11181

SEQ ID NO: 221289 - DNA, 699 bp, Canis familiaris; identical to SEQ ID NO: 11182
  misc_feature (93)..(93): n is a, c, g, or t

SEQ ID NO: 221290 - DNA, 542 bp, Canis familiaris; identical to SEQ ID NO: 11183

SEQ ID NO: 221291 - DNA, 581 bp, Canis familiaris; identical to SEQ ID NO: 11184

SEQ ID NO: 221292 - DNA, 674 bp, Canis familiaris; identical to SEQ ID NO: 11185

SEQ ID NO: 221293 - DNA, 636 bp, Canis familiaris; identical to SEQ ID NO: 11186

SEQ ID NO: 221294 - DNA, 589 bp, Canis familiaris; identical to SEQ ID NO: 11187

SEQ ID NO: 221295 - DNA, 658 bp, Canis familiaris; identical to SEQ ID NO: 11188

SEQ ID NO: 221296 - DNA, 661 bp, Canis familiaris; identical to SEQ ID NO: 11189

SEQ ID NO: 221297 - DNA, 649 bp, Canis familiaris; identical to SEQ ID NO: 11190
  misc_feature (145)..(145): n is a, c, g, or t

SEQ ID NO: 221298 - DNA, 587 bp, Canis familiaris; identical to SEQ ID NO: 11191
  misc_feature (6)..(6): n is a, c, g, or t

SEQ ID NO: 221299 - DNA, 634 bp, Canis familiaris; identical to SEQ ID NO: 11192

SEQ ID NO: 221300 - DNA, 586 bp, Canis familiaris; identical to SEQ ID NO: 11193

SEQ ID NO: 221301 - DNA, 641 bp, Canis familiaris; identical to SEQ ID NO: 11194

SEQ ID NO: 221302 - DNA, 609 bp, Canis familiaris; identical to SEQ ID NO: 11195

SEQ ID NO: 221303 - DNA, 611 bp, Canis familiaris; identical to SEQ ID NO: 11196

SEQ ID NO: 221304 - DNA, 432 bp, Canis familiaris; identical to SEQ ID NO: 11197

SEQ ID NO: 221305 - DNA, 574 bp, Canis familiaris; identical to SEQ ID NO: 11198

SEQ ID NO: 221306 - DNA, 675 bp, Canis familiaris; identical to SEQ ID NO: 11199

SEQ ID NO: 221307 - DNA, 671 bp, Canis familiaris; identical to SEQ ID NO: 11200

SEQ ID NO: 221308 - DNA, 543 bp, Canis familiaris; identical to SEQ ID NO: 11201
  misc_feature (292)..(292): n is a, c, g, or t

SEQ ID NO: 221309 - DNA, 596 bp, Canis familiaris; identical to SEQ ID NO: 11202

SEQ ID NO: 221310 - DNA, 604 bp, Canis familiaris; identical to SEQ ID NO: 11203

SEQ ID NO: 221311 - DNA, 630 bp, Canis familiaris; identical to SEQ ID NO: 11204

SEQ ID NO: 221312 - DNA, 553 bp, Canis familiaris; identical to SEQ ID NO: 11205

SEQ ID NO: 221313 - DNA, 640 bp, Canis familiaris; identical to SEQ ID NO: 11206

SEQ ID NO: 221314 - DNA, 523 bp, Canis familiaris; identical to SEQ ID NO: 11207
  misc_feature (140)..(140): n is a, c, g, or t
  misc_feature (179)..(181): n is a, c, g, or t
  misc_feature (200)..(200): n is a, c, g, or t
  misc_feature (215)..(215): n is a, c, g, or t
  misc_feature (217)..(217): n is a, c, g, or t
  misc_feature (223)..(224): n is a, c, g, or t
  misc_feature (232)..(233): n is a, c, g, or t
  misc_feature (247)..(247): n is a, c, g, or t
  misc_feature (259)..(259): n is a, c, g, or t
  misc_feature (272)..(274): n is a, c, g, or t

SEQ ID NO: 221315 - DNA, 639 bp, Canis familiaris; identical to SEQ ID NO: 11208

SEQ ID NO: 221316 - DNA, 575 bp, Canis familiaris; identical to SEQ ID NO: 11209

SEQ ID NO: 221317 - DNA, 605 bp, Canis familiaris; identical to SEQ ID NO: 11210
  misc_feature (272)..(272): n is a, c, g, or t

SEQ ID NO: 221318 - DNA, 538 bp, Canis familiaris; identical to SEQ ID NO: 11211

SEQ ID NO: 221319 - DNA, 605 bp, Canis familiaris; identical to SEQ ID NO: 11212
  misc_feature (1)..(1): n is a, c, g, or t

SEQ ID NO: 221320 - DNA, 633 bp, Canis familiaris; identical to SEQ ID NO: 11213

SEQ ID NO: 221321 - DNA, 450 bp, Canis familiaris; identical to SEQ ID NO: 11214

SEQ ID NO: 221322 - DNA, 623 bp, Canis familiaris; identical to SEQ ID NO: 11215

SEQ ID NO: 221323 - DNA, 584 bp, Canis familiaris; identical to SEQ ID NO: 11216

SEQ ID NO: 221324 - DNA, 139 bp, Canis familiaris; identical to SEQ ID NO: 11217

SEQ ID NO: 221325 - DNA, 622 bp, Canis familiaris; identical to SEQ ID NO: 11218

SEQ ID NO: 221326 - DNA, 538 bp, Canis familiaris; identical to SEQ ID NO: 11219

SEQ ID NO: 221327 - DNA, 225 bp, Canis familiaris; identical to SEQ ID NO: 11220

SEQ ID NO: 221328 - DNA, 644 bp, Canis familiaris; identical to SEQ ID NO: 11221

SEQ ID NO: 221329 - DNA, 522 bp, Canis familiaris; identical to SEQ ID NO: 11222

SEQ ID NO: 221330 - DNA, 569 bp, Canis familiaris; identical to SEQ ID NO: 11223

SEQ ID NO: 221331 - DNA, 614 bp, Canis familiaris; identical to SEQ ID NO: 11224
  misc_feature (12)..(12): n is a, c, g, or t

SEQ ID NO: 221332 - DNA, 600 bp, Canis familiaris; identical to SEQ ID NO: 11225
  misc_feature (209)..(209): n is a, c, g, or t

SEQ ID NO: 221333 - DNA, 544 bp, Canis familiaris; identical to SEQ ID NO: 11226

SEQ ID NO: 221334 - DNA, 562 bp, Canis familiaris; identical to SEQ ID NO: 11227

SEQ ID NO: 221335 - DNA, 465 bp, Canis familiaris; identical to SEQ ID NO: 11228

SEQ ID NO: 221336 - DNA, 477 bp, Canis familiaris; identical to SEQ ID NO: 11229
  misc_feature (1)..(1): n is a, c, g, or t

SEQ ID NO: 221337 - DNA, 621 bp, Canis familiaris; identical to SEQ ID NO: 11230

SEQ ID NO: 221338 - DNA, 466 bp, Canis familiaris; identical to SEQ ID NO: 11231

SEQ ID NO: 221339 - DNA, 565 bp, Canis familiaris; identical to SEQ ID NO: 11232

SEQ ID NO: 221340 - DNA, 559 bp, Canis familiaris; identical to SEQ ID NO: 11233
  misc_feature (191)..(191): n is a, c, g, or t
  misc_feature (202)..(202): n is a, c, g, or t

SEQ ID NO: 221341 - DNA, 572 bp, Canis familiaris; identical to SEQ ID NO: 11234

SEQ ID NO: 221342 - DNA, 700 bp, Canis familiaris; identical to SEQ ID NO: 11235

SEQ ID NO: 221343 - DNA, 539 bp, Canis familiaris; identical to SEQ ID NO: 11236

SEQ ID NO: 221344 - DNA, 471 bp, Canis familiaris; identical to SEQ ID NO: 11237

SEQ ID NO: 221345 - DNA, 637 bp, Canis familiaris; identical to SEQ ID NO: 11238
  misc_feature (5)..(5): n is a, c, g, or t

SEQ ID NO: 221346 - DNA, 551 bp, Canis familiaris; identical to SEQ ID NO: 11239

SEQ ID NO: 221347 - DNA, 511 bp, Canis familiaris; identical to SEQ ID NO: 11240

SEQ ID NO: 221348 - DNA, 278 bp, Canis familiaris; identical to SEQ ID NO: 11241

SEQ ID NO: 221349 - DNA, 676 bp, Canis familiaris; identical to SEQ ID NO: 11242

SEQ ID NO: 221350 - DNA, 610 bp, Canis familiaris; identical to SEQ ID NO: 11243

SEQ ID NO: 221351 - DNA, 333 bp, Canis familiaris; identical to SEQ ID NO: 11244

SEQ ID NO: 221352 - DNA, 552 bp, Canis familiaris; identical to SEQ ID NO: 11245

SEQ ID NO: 221353 - DNA, 590 bp, Canis familiaris; identical to SEQ ID NO: 11246

SEQ ID NO: 221354 - DNA, 607 bp, Canis familiaris; identical to SEQ ID NO: 11247

SEQ ID NO: 221355 - DNA, 445 bp, Canis familiaris; identical to SEQ ID NO: 11248

SEQ ID NO: 221356 - DNA, 683 bp, Canis familiaris; identical to SEQ ID NO: 11249

SEQ ID NO: 221357 - DNA, 512 bp, Canis familiaris; identical to SEQ ID NO: 11250

SEQ ID NO: 221358 - DNA, 481 bp, Canis familiaris; identical to SEQ ID NO: 11251
  misc_feature (51)..(51): n is a, c, g, or t

SEQ ID NO: 221359 - DNA, 580 bp, Canis familiaris; identical to SEQ ID NO: 11252

SEQ ID NO: 221360 - DNA, 550 bp, Canis familiaris; identical to SEQ ID NO: 11253

SEQ ID NO: 221361 - DNA, 587 bp, Canis familiaris; identical to SEQ ID NO: 11254

SEQ ID NO: 221362 - DNA, 596 bp, Canis familiaris; identical to SEQ ID NO: 11255

SEQ ID NO: 221363 - DNA, 637 bp, Canis familiaris; identical to SEQ ID NO: 11256

SEQ ID NO: 221364 - DNA, 614 bp, Canis familiaris; identical to SEQ ID NO: 11257

SEQ ID NO: 221365 - DNA, 564 bp, Canis familiaris; identical to SEQ ID NO: 11258
  misc_feature (1)..(1): n is a, c, g, or t

SEQ ID NO: 221366 - DNA, 407 bp, Canis familiaris; identical to SEQ ID NO: 11259
  misc_feature (349)..(350): n is a, c, g, or t
  misc_feature (400)..(400): n is a, c, g, or t

SEQ ID NO: 221367 - DNA, 410 bp, Canis familiaris; identical to SEQ ID NO: 11260

SEQ ID NO: 221368 - DNA, 589 bp, Canis familiaris; identical to SEQ ID NO: 11261

SEQ ID NO: 221369 - DNA, 578 bp, Canis familiaris; identical to SEQ ID NO: 11262

SEQ ID NO: 221370 - DNA, 506 bp, Canis familiaris; identical to SEQ ID NO: 11263

SEQ ID NO: 221371 - DNA, 604 bp, Canis familiaris; identical to SEQ ID NO: 11264

SEQ ID NO: 221372 - DNA, 529 bp, Canis familiaris; identical to SEQ ID NO: 11265

SEQ ID NO: 221373 - DNA, 481 bp, Canis familiaris; identical to SEQ ID NO: 11266

SEQ ID NO: 221374 - DNA, 635 bp, Canis familiaris; identical to SEQ ID NO: 11267

SEQ ID NO: 221375 - DNA, 168 bp, Canis familiaris; identical to SEQ ID NO: 11268

SEQ ID NO: 221376 - DNA, 575 bp, Canis familiaris; identical to SEQ ID NO: 11269

SEQ ID NO: 221377 - DNA, 496 bp, Canis familiaris; identical to SEQ ID NO: 11270

SEQ ID NO: 221378 - DNA, 703 bp, Canis familiaris; identical to SEQ ID NO: 11271

SEQ ID NO: 221379 - DNA, 627 bp, Canis familiaris; identical to SEQ ID NO: 11272

SEQ ID NO: 221380 - DNA, 403 bp, Canis familiaris; identical to SEQ ID NO: 11273

SEQ ID NO: 221381 - DNA, 644 bp, Canis familiaris; identical to SEQ ID NO: 11274

SEQ ID NO: 221382 - DNA, 615 bp, Canis familiaris; identical to SEQ ID NO: 11275

SEQ ID NO: 221383 - DNA, 699 bp, Canis familiaris; identical to SEQ ID NO: 11276

SEQ ID NO: 221384 - DNA, 709 bp, Canis familiaris; identical to SEQ ID NO: 11277

SEQ ID NO: 221385 - DNA, 637 bp, Canis familiaris; identical to SEQ ID NO: 11278

SEQ ID NO: 221386 - DNA, 549 bp, Canis familiaris; identical to SEQ ID NO: 11279

SEQ ID NO: 221387 - DNA, 598 bp, Canis familiaris; identical to SEQ ID NO: 11280

SEQ ID NO: 221388 - DNA, 557 bp, Canis familiaris; identical to SEQ ID NO: 11281

SEQ ID NO: 221389 - DNA, 584 bp, Canis familiaris; identical to SEQ ID NO: 11282

SEQ ID NO: 221390 - DNA, 657 bp, Canis familiaris; identical to SEQ ID NO: 11283

SEQ ID NO: 221391 - DNA, 676 bp, Canis familiaris; identical to SEQ ID NO: 11284

SEQ ID NO: 221392 - DNA, 595 bp, Canis familiaris; identical to SEQ ID NO: 11285

SEQ ID NO: 221393 - DNA, 545 bp, Canis familiaris; identical to SEQ ID NO: 11286

SEQ ID NO: 221394 - DNA, 545 bp, Canis familiaris; identical to SEQ ID NO: 11287

SEQ ID NO: 221395 - DNA, 555 bp, Canis familiaris; identical to SEQ ID NO: 11288

SEQ ID NO: 221396 - DNA, 575 bp, Canis familiaris; identical to SEQ ID NO: 11289

SEQ ID NO: 221397 - DNA, 560 bp, Canis familiaris; identical to SEQ ID NO: 11290

SEQ ID NO: 221398 - DNA, 594 bp, Canis familiaris; identical to SEQ ID NO: 11291

SEQ ID NO: 221399 - DNA, 515 bp, Canis familiaris; identical to SEQ ID NO: 11292

SEQ ID NO: 221400 - DNA, 596 bp, Canis familiaris; identical to SEQ ID NO: 11293

SEQ ID NO: 221401 - DNA, 637 bp, Canis familiaris; identical to SEQ ID NO: 11294
  misc_feature (78)..(78): n is a, c, g, or t

SEQ ID NO: 221402 - DNA, 325 bp, Canis familiaris; identical to SEQ ID NO: 11295

SEQ ID NO: 221403 - DNA, 664 bp, Canis familiaris; identical to SEQ ID NO: 11296
  misc_feature (1)..(1): n is a, c, g, or t

SEQ ID NO: 221404 - DNA, 595 bp, Canis familiaris; identical to SEQ ID NO: 11297

SEQ ID NO: 221405 - DNA, 509 bp, Canis familiaris; identical to SEQ ID NO: 11298
  misc_feature (202)..(202): n is a, c, g, or t

SEQ ID NO: 221406 - DNA, 745 bp, Canis familiaris; identical to SEQ ID NO: 11299

SEQ ID NO: 221407 - DNA, 584 bp, Canis familiaris; identical to SEQ ID NO: 11300
  misc_feature (1)..(1): n is a, c, g, or t

SEQ ID NO: 221408 - DNA, 617 bp, Canis familiaris; identical to SEQ ID NO: 11301

SEQ ID NO: 221409 - DNA, 505 bp, Canis familiaris; identical to SEQ ID NO: 11302

SEQ ID NO: 221410 - DNA, 631 bp, Canis familiaris; identical to SEQ ID NO: 11303
  misc_feature (55)..(55): n is a, c, g, or t

SEQ ID NO: 221411 - DNA, 670 bp, Canis familiaris; identical to SEQ ID NO: 11304

SEQ ID NO: 221412 - DNA, 565 bp, Canis familiaris; identical to SEQ ID NO: 11305

SEQ ID NO: 221413 - DNA, 731 bp, Canis familiaris; identical to SEQ ID NO: 11306

SEQ ID NO: 221414 - DNA, 554 bp, Canis familiaris; identical to SEQ ID NO: 11307
  misc_feature (1)..(1): n is a, c, g, or t

SEQ ID NO: 221415 - DNA, 712 bp, Canis familiaris; identical to SEQ ID NO: 11308

SEQ ID NO: 221416 - DNA, 625 bp, Canis familiaris; identical to SEQ ID NO: 11309
  misc_feature (104)..(104): n is a, c, g, or t
  misc_feature (451)..(451): n is a, c, g, or t

SEQ ID NO: 221417 - DNA, 613 bp, Canis familiaris; identical to SEQ ID NO: 11310

SEQ ID NO: 221418 - DNA, 658 bp, Canis familiaris; identical to SEQ ID NO: 11311

SEQ ID NO: 221419 - DNA, 597 bp, Canis familiaris; identical to SEQ ID NO: 11312

SEQ ID NO: 221420 - DNA, 536 bp, Canis familiaris; identical to SEQ ID NO: 11313

SEQ ID NO: 221421 - DNA, 640 bp, Canis familiaris; identical to SEQ ID NO: 11314
  misc_feature (1)..(1): n is a, c, g, or t

SEQ ID NO: 221422 - DNA, 552 bp, Canis familiaris; identical to SEQ ID NO: 11315

SEQ ID NO: 221423 - DNA, 692 bp, Canis familiaris; identical to SEQ ID NO: 11316

SEQ ID NO: 221424 - DNA, 590 bp, Canis familiaris; identical to SEQ ID NO: 11317

SEQ ID NO: 221425 - DNA, 663 bp, Canis familiaris; identical to SEQ ID NO: 11318

SEQ ID NO: 221426 - DNA, 560 bp, Canis familiaris; identical to SEQ ID NO: 11319

SEQ ID NO: 221427 - DNA, 580 bp, Canis familiaris; identical to SEQ ID NO: 11320

SEQ ID NO: 221428 - DNA, 531 bp, Canis familiaris; identical to SEQ ID NO: 11321

SEQ ID NO: 221429 - DNA, 638 bp, Canis familiaris; identical to SEQ ID NO: 11322

SEQ ID NO: 221430 - DNA, 640 bp, Canis familiaris; identical to SEQ ID NO: 11323

SEQ ID NO: 221431 - DNA, 600 bp, Canis familiaris; identical to SEQ ID NO: 11324

SEQ ID NO: 221432 - DNA, 635 bp, Canis familiaris; identical to SEQ ID NO: 11325
  misc_feature (44)..(44): n is a, c, g, or t

SEQ ID NO: 221433 - DNA, 527 bp, Canis familiaris; identical to SEQ ID NO: 11326
  misc_feature (37)..(37): n is a, c, g, or t
  misc_feature (336)..(336): n is a, c, g, or t

SEQ ID NO: 221434 - DNA, 569 bp, Canis familiaris; identical to SEQ ID NO: 11327

SEQ ID NO: 221435 - DNA, 655 bp, Canis familiaris; identical to SEQ ID NO: 11328

SEQ ID NO: 221436 - DNA, 514 bp, Canis familiaris; identical to SEQ ID NO: 11329
  misc_feature (301)..(301): n is a, c, g, or t

SEQ ID NO: 221437 - DNA, 628 bp, Canis familiaris; identical to SEQ ID NO: 11330
  misc_feature (247)..(247): n is a, c, g, or t

SEQ ID NO: 221438 - DNA, 710 bp, Canis familiaris; identical to SEQ ID NO: 11331

SEQ ID NO: 221439 - DNA, 674 bp, Canis familiaris; identical to SEQ ID NO: 11332

SEQ ID NO: 221440 - DNA, 335 bp, Canis familiaris; identical to SEQ ID NO: 11333

SEQ ID NO: 221441 - DNA, 665 bp, Canis familiaris; identical to SEQ ID NO: 11334
  misc_feature (406)..(406): n is a, c, g, or t

SEQ ID NO: 221442 - DNA, 621 bp, Canis familiaris; identical to SEQ ID NO: 11335

SEQ ID NO: 221443 - DNA, 304 bp, Canis familiaris; identical to SEQ ID NO: 11336

SEQ ID NO: 221444 - DNA, 665 bp, Canis familiaris; identical to SEQ ID NO: 11337

SEQ ID NO: 221445 - DNA, 207 bp, Canis familiaris; identical to SEQ ID NO: 11338

SEQ ID NO: 221446 - DNA, 524 bp, Canis familiaris; identical to SEQ ID NO: 11339

SEQ ID NO: 221447 - DNA, 591 bp, Canis familiaris; identical to SEQ ID NO: 11340

SEQ ID NO: 221448 - DNA, 683 bp, Canis familiaris; identical to SEQ ID NO: 11341
  misc_feature (42)..(42): n is a, c, g, or t
  misc_feature (107)..(107): n is a, c, g, or t

SEQ ID NO: 221449 - DNA, 443 bp, Canis familiaris; identical to SEQ ID NO: 11342

SEQ ID NO: 221450 - DNA, 605 bp, Canis familiaris; identical to SEQ ID NO: 11343

SEQ ID NO: 221451 - DNA, 640 bp, Canis familiaris; identical to SEQ ID NO: 11344

SEQ ID NO: 221452 - DNA, 534 bp, Canis familiaris; identical to SEQ ID NO: 11345

SEQ ID NO: 221453 - DNA, 504 bp, Canis familiaris; identical to SEQ ID NO: 11346

SEQ ID NO: 221454 - DNA, 646 bp, Canis familiaris; identical to SEQ ID NO: 11347

SEQ ID NO: 221455 - DNA, 451 bp, Canis familiaris; identical to SEQ ID NO: 11348

SEQ ID NO: 221456 - DNA, 668 bp, Canis familiaris; identical to SEQ ID NO: 11349
  misc_feature (1)..(1): n is a, c, g, or t
  misc_feature (275)..(275): n is a, c, g, or t

SEQ ID NO: 221457 - DNA, 644 bp, Canis familiaris; identical to SEQ ID NO: 11350

SEQ ID NO: 221458 - DNA, 564 bp, Canis familiaris; identical to SEQ ID NO: 11351

SEQ ID NO: 221459 - DNA, 585 bp, Canis familiaris; identical to SEQ ID NO: 11352

SEQ ID NO: 221460 - DNA, 548 bp, Canis familiaris; identical to SEQ ID NO: 11353

SEQ ID NO: 221461 - DNA, 637 bp, Canis familiaris; identical to SEQ ID NO: 11354
  misc_feature (585)..(585): n is a, c, g, or t

SEQ ID NO: 221462 - DNA, 559 bp, Canis familiaris; identical to SEQ ID NO: 11355
  misc_feature (1)..(1): n is a, c, g, or t

SEQ ID NO: 221463 - DNA, 537 bp, Canis familiaris; identical to SEQ ID NO: 11356

SEQ ID NO: 221464 - DNA, 691 bp, Canis familiaris; identical to SEQ ID NO: 11357
  misc_feature (410)..(410): n is a, c, g, or t

SEQ ID NO: 221465 - DNA, 439 bp, Canis familiaris; identical to SEQ ID NO: 11358

SEQ ID NO: 221466 - DNA, 521 bp, Canis familiaris; identical to SEQ ID NO: 11359

SEQ ID NO: 221467 - DNA, 636 bp, Canis familiaris; identical to SEQ ID NO: 11360

SEQ ID NO: 221468 - DNA, 533 bp, Canis familiaris; identical to SEQ ID NO: 11361

SEQ ID NO: 221469 - DNA, 564 bp, Canis familiaris; identical to SEQ ID NO: 11362
  misc_feature (1)..(1): n is a, c, g, or t

SEQ ID NO: 221470 - DNA, 574 bp, Canis familiaris; identical to SEQ ID NO: 11363

SEQ ID NO: 221471 - DNA, 602 bp, Canis familiaris; identical to SEQ ID NO: 11364

SEQ ID NO: 221472 - DNA, 582 bp, Canis familiaris; identical to SEQ ID NO: 11365

SEQ ID NO: 221473 - DNA, 593 bp, Canis familiaris; identical to SEQ ID NO: 11366

SEQ ID NO: 221474 - DNA, 600 bp, Canis familiaris; identical to SEQ ID NO: 11367

SEQ ID NO: 221475 - DNA, 631 bp, Canis familiaris; identical to SEQ ID NO: 11368
  misc_feature (48)..(48): n is a, c, g, or t

SEQ ID NO: 221476 - DNA, 390 bp, Canis familiaris; identical to SEQ ID NO: 11369

SEQ ID NO: 221477 - DNA, 510 bp, Canis familiaris; identical to SEQ ID NO: 11370

SEQ ID NO: 221478 - DNA, 534 bp, Canis familiaris; identical to SEQ ID NO: 11371

SEQ ID NO: 221479 - DNA, 621 bp, Canis familiaris; identical to SEQ ID NO: 11372
  misc_feature (249)..(249): n is a, c, g, or t

SEQ ID NO: 221480 - DNA, 600 bp, Canis familiaris; identical to SEQ ID NO: 11373
  misc_feature (1)..(1): n is a, c, g, or t

SEQ ID NO: 221481 - DNA, 623 bp, Canis familiaris; identical to SEQ ID NO: 11374

SEQ ID NO: 221482 - DNA, 469 bp, Canis familiaris; identical to SEQ ID NO: 11375

SEQ ID NO: 221483 - DNA, 636 bp, Canis familiaris; identical to SEQ ID NO: 11376

SEQ ID NO: 221484 - DNA, 494 bp, Canis familiaris; identical to SEQ ID NO: 11377
  misc_feature (357)..(357): n is a, c, g, or t

SEQ ID NO: 221485 - DNA, 592 bp, Canis familiaris; identical to SEQ ID NO: 11378
  misc_feature (1)..(1): n is a, c, g, or t

SEQ ID NO: 221486 - DNA, 501 bp, Canis familiaris; identical to SEQ ID NO: 11379

SEQ ID NO: 221487 - DNA, 701 bp, Canis familiaris; identical to SEQ ID NO: 11380

SEQ ID NO: 221488 - DNA, 572 bp, Canis familiaris; identical to SEQ ID NO: 11381

SEQ ID NO: 221489 - DNA, 577 bp, Canis familiaris; identical to SEQ ID NO: 11382

SEQ ID NO: 221490 - DNA, 586 bp, Canis familiaris; identical to SEQ ID NO: 11383

SEQ ID NO: 221491 - DNA, 606 bp, Canis familiaris; identical to SEQ ID NO: 11384

SEQ ID NO: 221492 - DNA, 278 bp, Canis familiaris; identical to SEQ ID NO: 11385
  misc_feature (1)..(1): n is a, c, g, or t
  misc_feature (41)..(41): n is a, c, g, or t

SEQ ID NO: 221493 - DNA, 473 bp, Canis familiaris; identical to SEQ ID NO: 11386
  misc_feature (1)..(1): n is a, c, g, or t

SEQ ID NO: 221494 - DNA, 622 bp, Canis familiaris; identical to SEQ ID NO: 11387

SEQ ID NO: 221495 - DNA, 662 bp, Canis familiaris; identical to SEQ ID NO: 11388

SEQ ID NO: 221496 - DNA, 653 bp, Canis familiaris; identical to SEQ ID NO: 11389
  misc_feature (441)..(441): n is a, c, g, or t

SEQ ID NO: 221497 - DNA, 600 bp, Canis familiaris; identical to SEQ ID NO: 11390

SEQ ID NO: 221498 - DNA, 648 bp, Canis familiaris; identical to SEQ ID NO: 11391

SEQ ID NO: 221499 - DNA, 597 bp, Canis familiaris; identical to SEQ ID NO: 11392

SEQ ID NO: 221500 - DNA, 577 bp, Canis familiaris; identical to SEQ ID NO: 11393

SEQ ID NO: 221501 - DNA, 578 bp, Canis familiaris; identical to SEQ ID NO: 11394

SEQ ID NO: 221502 - DNA, 630 bp, Canis familiaris; identical to SEQ ID NO: 11395

SEQ ID NO: 221503 - DNA, 630 bp, Canis familiaris; identical to SEQ ID NO: 11396

SEQ ID NO: 221504 - DNA, 660 bp, Canis familiaris; identical to SEQ ID NO: 11397

SEQ ID NO: 221505 - DNA, 520 bp, Canis familiaris; identical to SEQ ID NO: 11398
  misc_feature (1)..(1): n is a, c, g, or t
  misc_feature (74)..(74): n is a, c, g, or t
  misc_feature (89)..(89): n is a, c, g, or t

SEQ ID NO: 221506 - DNA, 616 bp, Canis familiaris; identical to SEQ ID NO: 11399

SEQ ID NO: 221507 - DNA, 208 bp, Canis familiaris; identical to SEQ ID NO: 11400

SEQ ID NO: 221508 - DNA, 615 bp, Canis familiaris; identical to SEQ ID NO: 11401
  misc_feature (113)..(113): n is a, c, g, or t
  misc_feature (154)..(154): n is a, c, g, or t
  misc_feature (178)..(178): n is a, c, g, or t
  misc_feature (185)..(185): n is a, c, g, or t
  misc_feature (192)..(192): n is a, c, g, or t
  misc_feature (332)..(332): n is a, c, g, or t
  misc_feature (347)..(347): n is a, c, g, or t
  misc_feature (350)..(350): n is a, c, g, or t

SEQ ID NO: 221509 - DNA, 644 bp, Canis familiaris; identical to SEQ ID NO: 11402

SEQ ID NO: 221510 - DNA, 641 bp, Canis familiaris; identical to SEQ ID NO: 11403
  misc_feature (129)..(129): n is a, c, g, or t
  misc_feature (151)..(152): n is a, c, g, or t
  misc_feature (330)..(330): n is a, c, g, or t

SEQ ID NO: 221511 - DNA, 445 bp, Canis familiaris; identical to SEQ ID NO: 11404

SEQ ID NO: 221512 - DNA, 622 bp, Canis familiaris; identical to SEQ ID NO: 11405

SEQ ID NO: 221513 - DNA, 641 bp, Canis familiaris; identical to SEQ ID NO: 11406

SEQ ID NO: 221514 - DNA, 497 bp, Canis familiaris; identical to SEQ ID NO: 11407
  misc_feature (1)..(1): n is a, c, g, or t
  misc_feature (187)..(188): n is a, c, g, or t
  misc_feature (210)..(211): n is a, c, g, or t

SEQ ID NO: 221515 - DNA, 560 bp, Canis familiaris; identical to SEQ ID NO: 11408

SEQ ID NO: 221516 - DNA, 256 bp, Canis familiaris; identical to SEQ ID NO: 11409

SEQ ID NO: 221517 - DNA, 657 bp, Canis familiaris; identical to SEQ ID NO: 11410

SEQ ID NO: 221518 - DNA, 601 bp, Canis familiaris; identical to SEQ ID NO: 11411
  misc_feature (158)..(158): n is a, c, g, or t

SEQ ID NO: 221519 - DNA, 516 bp, Canis familiaris; identical to SEQ ID NO: 11412

SEQ ID NO: 221520 - DNA, 475 bp, Canis familiaris; identical to SEQ ID NO: 11413

SEQ ID NO: 221521 - DNA, 455 bp, Canis familiaris; identical to SEQ ID NO: 11414

SEQ ID NO: 221522 - DNA, 586 bp, Canis familiaris; identical to SEQ ID NO: 11415

SEQ ID NO: 221523 - DNA, 654 bp, Canis familiaris; identical to SEQ ID NO: 11416
  misc_feature (212)..(212): n is a, c, g, or t

SEQ ID NO: 221524 - DNA, 529 bp, Canis familiaris; identical to SEQ ID NO: 11417

SEQ ID NO: 221525 - DNA, 585 bp, Canis familiaris; identical to SEQ ID NO: 11418

SEQ ID NO: 221526 - DNA, 197 bp, Canis familiaris; identical to SEQ ID NO: 11419

SEQ ID NO: 221527 - DNA, 256 bp, Canis familiaris; identical to SEQ ID NO: 11420

SEQ ID NO: 221528 - DNA, 566 bp, Canis familiaris; identical to SEQ ID NO: 11421

SEQ ID NO: 221529 - DNA, 611 bp, Canis familiaris; identical to SEQ ID NO: 11422

SEQ ID NO: 221530 - DNA, 573 bp, Canis familiaris; identical to SEQ ID NO: 11423

SEQ ID NO: 221531 - DNA, 616 bp, Canis familiaris; identical to SEQ ID NO: 11424
  misc_feature (26)..(26): n is a, c, g, or t

SEQ ID NO: 221532 - DNA, 463 bp, Canis familiaris; identical to SEQ ID NO: 11425

SEQ ID NO: 221533 - DNA, 625 bp, Canis familiaris; identical to SEQ ID NO: 11426

SEQ ID NO: 221534 - DNA, 648 bp, Canis familiaris; identical to SEQ ID NO: 11427

SEQ ID NO: 221535 - DNA, 546 bp, Canis familiaris; identical to SEQ ID NO: 11428

SEQ ID NO: 221536 - DNA, 435 bp, Canis familiaris; identical to SEQ ID NO: 11429

SEQ ID NO: 221537 - DNA, 138 bp, Canis familiaris; identical to SEQ ID NO: 11430

SEQ ID NO: 221538 - DNA, 661 bp, Canis familiaris; identical to SEQ ID NO: 11431

SEQ ID NO: 221539 - DNA, 519 bp, Canis familiaris; identical to SEQ ID NO: 11432

SEQ ID NO: 221540 - DNA, 585 bp, Canis familiaris; identical to SEQ ID NO: 11433

SEQ ID NO: 221541 - DNA, 586 bp, Canis familiaris; identical to SEQ ID NO: 11434

SEQ ID NO: 221542 - DNA, 614 bp, Canis familiaris; identical to SEQ ID NO: 11435

SEQ ID NO: 221543 - DNA, 509 bp, Canis familiaris; identical to SEQ ID NO: 11436
  misc_feature (293)..(294): n is a, c, g, or t
  misc_feature (329)..(330): n is a, c, g, or t

SEQ ID NO: 221544 - DNA, 653 bp, Canis familiaris; identical to SEQ ID NO: 11437

SEQ ID NO: 221545 - DNA, 609 bp, Canis familiaris; identical to SEQ ID NO: 11438

SEQ ID NO: 221546 - DNA, 640 bp, Canis familiaris; identical to SEQ ID NO: 11439
  misc_feature (276)..(276): n is a, c, g, or t

SEQ ID NO: 221547 - DNA, 574 bp, Canis familiaris; identical to SEQ ID NO: 11440

SEQ ID NO: 221548 - DNA, 603 bp, Canis familiaris; identical to SEQ ID NO: 11441

SEQ ID NO: 221549 - DNA, 679 bp, Canis familiaris; identical to SEQ ID NO: 11442

SEQ ID NO: 221550 - DNA, 590 bp, Canis familiaris; identical to SEQ ID NO: 11443

SEQ ID NO: 221551 - DNA, 472 bp, Canis familiaris; identical to SEQ ID NO: 11444

SEQ ID NO: 221552 - DNA, 247 bp, Canis familiaris; identical to SEQ ID NO: 11445
  misc_feature (1)..(1): n is a, c, g, or t
  misc_feature (46)..(46): n is a, c, g, or t

SEQ ID NO: 221553 - DNA, 379 bp, Canis familiaris; identical to SEQ ID NO: 11446

SEQ ID NO: 221554 - DNA, 610 bp, Canis familiaris; identical to SEQ ID NO: 11447

SEQ ID NO: 221555 - DNA, 656 bp, Canis familiaris; identical to SEQ ID NO: 11448
  misc_feature (1)..(1): n is a, c, g, or t

SEQ ID NO: 221556 - DNA, 595 bp, Canis familiaris; identical to SEQ ID NO: 11449

SEQ ID NO: 221557 - DNA, 492 bp, Canis familiaris; identical to SEQ ID NO: 11450

SEQ ID NO: 221558 - DNA, 634 bp, Canis familiaris; identical to SEQ ID NO: 11451

SEQ ID NO: 221559 - DNA, 640 bp, Canis familiaris; identical to SEQ ID NO: 11452

SEQ ID NO: 221560 - DNA, 207 bp, Canis familiaris; identical to SEQ ID NO: 11453

SEQ ID NO: 221561 - DNA, 570 bp, Canis familiaris; identical to SEQ ID NO: 11454

SEQ ID NO: 221562 - DNA, 637 bp, Canis familiaris; identical to SEQ ID NO: 11455

SEQ ID NO: 221563 - DNA, 593 bp, Canis familiaris; identical to SEQ ID NO: 11456

SEQ ID NO: 221564 - DNA, 613 bp, Canis familiaris; identical to SEQ ID NO: 11457
  misc_feature (3)..(3): n is a, c, g, or t

SEQ ID NO: 221565 - DNA, 606 bp, Canis familiaris; identical to SEQ ID NO: 11458

SEQ ID NO: 221566 - DNA, 596 bp, Canis familiaris; identical to SEQ ID NO: 11459

SEQ ID NO: 221567 - DNA, 622 bp, Canis familiaris; identical to SEQ ID NO: 11460

SEQ ID NO: 221568 - DNA, 502 bp, Canis familiaris; identical to SEQ ID NO: 11461

SEQ ID NO: 221569 - DNA, 567 bp, Canis familiaris; identical to SEQ ID NO: 11462

SEQ ID NO: 221570 - DNA, 169 bp, Canis familiaris; identical to SEQ ID NO: 11463

SEQ ID NO: 221571 - DNA, 101 bp, Canis familiaris; identical to SEQ ID NO: 11464

SEQ ID NO: 221572 - DNA, 523 bp, Canis familiaris; identical to SEQ ID NO: 11465

SEQ ID NO: 221573 - DNA, 559 bp, Canis familiaris; identical to SEQ ID NO: 11466

SEQ ID NO: 221574 - DNA, 503 bp, Canis familiaris; identical to SEQ ID NO: 11467

SEQ ID NO: 221575 - DNA, 549 bp, Canis familiaris; identical to SEQ ID NO: 11468

SEQ ID NO: 221576 - DNA, 565 bp, Canis familiaris; identical to SEQ ID NO: 11469

SEQ ID NO: 221577 - DNA, 390 bp, Canis familiaris; identical to SEQ ID NO: 11470

SEQ ID NO: 221578 - DNA, 619 bp, Canis familiaris; identical to SEQ ID NO: 11471

SEQ ID NO: 221579 - DNA, 617 bp, Canis familiaris; identical to SEQ ID NO: 11472

SEQ ID NO: 221580 - DNA, 517 bp, Canis familiaris; identical to SEQ ID NO: 11473

SEQ ID NO: 221581 - DNA, 572 bp, Canis familiaris; identical to SEQ ID NO: 11474

SEQ ID NO: 221582 - DNA, 211 bp, Canis familiaris; identical to SEQ ID NO: 11475

SEQ ID NO: 221583 - DNA, 445 bp, Canis familiaris; identical to SEQ ID NO: 11476

SEQ ID NO: 221584 - DNA, 600 bp, Canis familiaris; identical to SEQ ID NO: 11477

SEQ ID NO: 221585 - DNA, 426 bp, Canis familiaris; identical to SEQ ID NO: 11478
  misc_feature (1)..(1): n is a, c, g, or t

SEQ ID NO: 221586 - DNA, 523 bp, Canis familiaris; identical to SEQ ID NO: 11479

SEQ ID NO: 221587 - DNA, 508 bp, Canis familiaris; identical to SEQ ID NO: 11480

SEQ ID NO: 221588 - DNA, 633 bp, Canis familiaris; identical to SEQ ID NO: 11481

SEQ ID NO: 221589 - DNA, 635 bp, Canis familiaris; identical to SEQ ID NO: 11482

SEQ ID NO: 221590 - DNA, 576 bp, Canis familiaris; identical to SEQ ID NO: 11483

SEQ ID NO: 221591 - DNA, 653 bp, Canis familiaris; identical to SEQ ID NO: 11484

SEQ ID NO: 221592 - DNA, 544 bp, Canis familiaris; identical to SEQ ID NO: 11485
  misc_feature (1)..(1): n is a, c, g, or t

SEQ ID NO: 221593 - DNA, 541 bp, Canis familiaris; identical to SEQ ID NO: 11486

SEQ ID NO: 221594 - DNA, 603 bp, Canis familiaris; identical to SEQ ID NO: 11487

SEQ ID NO: 221595 - DNA, 650 bp, Canis familiaris; identical to SEQ ID NO: 11488

SEQ ID NO: 221596 - DNA, 564 bp, Canis familiaris; identical to SEQ ID NO: 11489

SEQ ID NO: 221597 - DNA, 606 bp, Canis familiaris; identical to SEQ ID NO: 11490

SEQ ID NO: 221598 - DNA, 613 bp, Canis familiaris; identical to SEQ ID NO: 11491

SEQ ID NO: 221599 - DNA, 606 bp, Canis familiaris; identical to SEQ ID NO: 11492

SEQ ID NO: 221600 - DNA, 576 bp, Canis familiaris; identical to SEQ ID NO: 11493
  misc_feature (419)..(419): n is a, c, g, or t
  misc_feature (427)..(427): n is a, c, g, or t

SEQ ID NO: 221601 - DNA, 605 bp, Canis familiaris; identical to SEQ ID NO: 11494
  misc_feature (421)..(421): n is a, c, g, or t

SEQ ID NO: 221602 - DNA, 587 bp, Canis familiaris; identical to SEQ ID NO: 11495

SEQ ID NO: 221603 - DNA, 657 bp, Canis familiaris; identical to SEQ ID NO: 11496

SEQ ID NO: 221604 - DNA, 446 bp, Canis familiaris; identical to SEQ ID NO: 11497

SEQ ID NO: 221605 - DNA, 688 bp, Canis familiaris; identical to SEQ ID NO: 11498

SEQ ID NO: 221606 - DNA, 622 bp, Canis familiaris; identical to SEQ ID NO: 11499
  misc_feature (1)..(1): n is a, c, g, or t

SEQ ID NO: 221607 - DNA, 646 bp, Canis familiaris; identical to SEQ ID NO: 11500

SEQ ID NO: 221608 - DNA, 606 bp, Canis familiaris; identical to SEQ ID NO: 11501
  misc_feature (61)..(61): n is a, c, g, or t
  misc_feature (136)..(136): n is a, c, g, or t

SEQ ID NO: 221609 - DNA, 559 bp, Canis familiaris; identical to SEQ ID NO: 11502
  misc_feature (550)..(550): n is a, c, g, or t

SEQ ID NO: 221610 - DNA, 590 bp, Canis familiaris; identical to SEQ ID NO: 11503

SEQ ID NO: 221611 - DNA, 622 bp, Canis familiaris; identical to SEQ ID NO: 11504

SEQ ID NO: 221612 - DNA, 542 bp, Canis familiaris; identical to SEQ ID NO: 11505

SEQ ID NO: 221613 - DNA, 616 bp, Canis familiaris; identical to SEQ ID NO: 11506

SEQ ID NO: 221614 - DNA, 582 bp, Canis familiaris; identical to SEQ ID NO: 11507

SEQ ID NO: 221615 - DNA, 705 bp, Canis familiaris; identical to SEQ ID NO: 11508

SEQ ID NO: 221616 - DNA, 687 bp, Canis familiaris; identical to SEQ ID NO: 11509

SEQ ID NO: 221617 - DNA, 584 bp, Canis familiaris; identical to SEQ ID NO: 11510

SEQ ID NO: 221618 - DNA, 588 bp, Canis familiaris; identical to SEQ ID NO: 11511

SEQ ID NO: 221619 - DNA, 653 bp, Canis familiaris; identical to SEQ ID NO: 11512
  misc_feature (104)..(104): n is a, c, g, or t

SEQ ID NO: 221620 - DNA, 642 bp, Canis familiaris; identical to SEQ ID NO: 11513

SEQ ID NO: 221621 - DNA, 603 bp, Canis familiaris; identical to SEQ ID NO: 11514

SEQ ID NO: 221622 - DNA, 551 bp, Canis familiaris; identical to SEQ ID NO: 11515

SEQ ID NO: 221623 - DNA, 373 bp, Canis familiaris; identical to SEQ ID NO: 11516

SEQ ID NO: 221624 - DNA, 640 bp, Canis familiaris; identical to SEQ ID NO: 11517

SEQ ID NO: 221625 - DNA, 632 bp, Canis familiaris; identical to SEQ ID NO: 11518
  misc_feature (1)..(1): n is a, c, g, or t

SEQ ID NO: 221626 - DNA, 586 bp, Canis familiaris; identical to SEQ ID NO: 11519

SEQ ID NO: 221627 - DNA, 524 bp, Canis familiaris; identical to SEQ ID NO: 11520

SEQ ID NO: 221628 - DNA, 695 bp, Canis familiaris; identical to SEQ ID NO: 11521

SEQ ID NO: 221629 - DNA, 658 bp, Canis familiaris; identical to SEQ ID NO: 11522
  misc_feature (17)..(17): n is a, c, g, or t
  misc_feature (104)..(104): n is a, c, g, or t

SEQ ID NO: 221630 - DNA, 569 bp, Canis familiaris; identical to SEQ ID NO: 11523
  misc_feature (35)..(35): n is a, c, g, or t

SEQ ID NO: 221631 - DNA, 597 bp, Canis familiaris; identical to SEQ ID NO: 11524

SEQ ID NO: 221632 - DNA, 563 bp, Canis familiaris; identical to SEQ ID NO: 11525

SEQ ID NO: 221633 - DNA, 593 bp, Canis familiaris; identical to SEQ ID NO: 11526

SEQ ID NO: 221634 - DNA, 569 bp, Canis familiaris; identical to SEQ ID NO: 11527

SEQ ID NO: 221635 - DNA, 646 bp, Canis familiaris; identical to SEQ ID NO: 11528

SEQ ID NO: 221636 - DNA, 612 bp, Canis familiaris; identical to SEQ ID NO: 11529

SEQ ID NO: 221637 - DNA, 702 bp, Canis familiaris; identical to SEQ ID NO: 11530
  misc_feature (1)..(1): n is a, c, g, or t
  misc_feature (15)..(15): n is a, c, g, or t

SEQ ID NO: 221638 - DNA, 666 bp, Canis familiaris; identical to SEQ ID NO: 11531

SEQ ID NO: 221639 - DNA, 538 bp, Canis familiaris; identical to SEQ ID NO: 11532

SEQ ID NO: 221640 - DNA, 540 bp, Canis familiaris; identical to SEQ ID NO: 11533

SEQ ID NO: 221641 - DNA, 681 bp, Canis familiaris; identical to SEQ ID NO: 11534

SEQ ID NO: 221642 - DNA, 628 bp, Canis familiaris; identical to SEQ ID NO: 11535

SEQ ID NO: 221643 - DNA, 651 bp, Canis familiaris; identical to SEQ ID NO: 11536

SEQ ID NO: 221644 - DNA, 562 bp, Canis familiaris; identical to SEQ ID NO: 11537

SEQ ID NO: 221645 - DNA, 498 bp, Canis familiaris; identical to SEQ ID NO: 11538

SEQ ID NO: 221646 - DNA, 593 bp, Canis familiaris; identical to SEQ ID NO: 11539

SEQ ID NO: 221647 - DNA, 586 bp, Canis familiaris; identical to SEQ ID NO: 11540
  misc_feature (556)..(556): n is a, c, g, or t

SEQ ID NO: 221648 - DNA, 609 bp, Canis familiaris; identical to SEQ ID NO: 11541

SEQ ID NO: 221649 - DNA, 567 bp, Canis familiaris; identical to SEQ ID NO: 11542

SEQ ID NO: 221650 - DNA, 587 bp, Canis familiaris; identical to SEQ ID NO: 11543

SEQ ID NO: 221651 - DNA, 657 bp, Canis familiaris; identical to SEQ ID NO: 11544

SEQ ID NO: 221652 - DNA, 654 bp, Canis familiaris; identical to SEQ ID NO: 11545

SEQ ID NO: 221653 - DNA, 610 bp, Canis familiaris; identical to SEQ ID NO: 11546

SEQ ID NO: 221654 - DNA, 631 bp, Canis familiaris; identical to SEQ ID NO: 11547

SEQ ID NO: 221655 - DNA, 636 bp, Canis familiaris; identical to SEQ ID NO: 11548

SEQ ID NO: 221656 - DNA, 617 bp, Canis familiaris; identical to SEQ ID NO: 11549

SEQ ID NO: 221657 - DNA, 548 bp, Canis familiaris; identical to SEQ ID NO: 11550
  misc_feature (63)..(63): n is a, c, g, or t

SEQ ID NO: 221658 - DNA, 671 bp, Canis familiaris; identical to SEQ ID NO: 11551

SEQ ID NO: 221659 - DNA, 634 bp, Canis familiaris; identical to SEQ ID NO: 11552

SEQ ID NO: 221660 - DNA, 622 bp, Canis familiaris; identical to SEQ ID NO: 11553
  misc_feature (19)..(19): n is a, c, g, or t

SEQ ID NO: 221661 - DNA, 504 bp, Canis familiaris; identical to SEQ ID NO: 11554
  misc_feature (1)..(1): n is a, c, g, or t

SEQ ID NO: 221662 - DNA, 523 bp, Canis familiaris; identical to SEQ ID NO: 11555

SEQ ID NO: 221663 - DNA, 574 bp, Canis familiaris; identical to SEQ ID NO: 11556

SEQ ID NO: 221664 - DNA, 595 bp, Canis familiaris; identical to SEQ ID NO: 11557

SEQ ID NO: 221665 - DNA, 640 bp, Canis familiaris; identical to SEQ ID NO: 11558
  misc_feature (336)..(336): n is a, c, g, or t

SEQ ID NO: 221666 - DNA, 627 bp, Canis familiaris; identical to SEQ ID NO: 11559

SEQ ID NO: 221667 - DNA, 622 bp, Canis familiaris; identical to SEQ ID NO: 11560

SEQ ID NO: 221668 - DNA, 565 bp, Canis familiaris; identical to SEQ ID NO: 11561
  misc_feature (395)..(395): n is a, c, g, or t

SEQ ID NO: 221669 - DNA, 726 bp, Canis familiaris; identical to SEQ ID NO: 11562

SEQ ID NO: 221670 - DNA, 551 bp, Canis familiaris; identical to SEQ ID NO: 11563
  misc_feature (479)..(479): n is a, c, g, or t
  misc_feature (494)..(494): n is a, c, g, or t
  misc_feature (503)..(504): n is a, c, g, or t
  misc_feature (511)..(511): n is a, c, g, or t

SEQ ID NO: 221671 - DNA, 559 bp, Canis familiaris; identical to SEQ ID NO: 11564

SEQ ID NO: 221672 - DNA, 614 bp, Canis familiaris; identical to SEQ ID NO: 11565

SEQ ID NO: 221673 - DNA, 178 bp, Canis familiaris; identical to SEQ ID NO: 11566

SEQ ID NO: 221674 - DNA, 579 bp, Canis familiaris; identical to SEQ ID NO: 11567

SEQ ID NO: 221675 - DNA, 576 bp, Canis familiaris; identical to SEQ ID NO: 11568

SEQ ID NO: 221676 - DNA, 614 bp, Canis familiaris; identical to SEQ ID NO: 11569

SEQ ID NO: 221677 - DNA, 629 bp, Canis familiaris; identical to SEQ ID NO: 11570

SEQ ID NO: 221678 - DNA, 642 bp, Canis familiaris; identical to SEQ ID NO: 11571
  misc_feature (420)..(420): n is a, c, g, or t

SEQ ID NO: 221679 - DNA, 604 bp, Canis familiaris; identical to SEQ ID NO: 11572

SEQ ID NO: 221680 - DNA, 660 bp, Canis familiaris; identical to SEQ ID NO: 11573

SEQ ID NO: 221681 - DNA, 589 bp, Canis familiaris; identical to SEQ ID NO: 11574

SEQ ID NO: 221682 - DNA, 580 bp, Canis familiaris; identical to SEQ ID NO: 11575
  misc_feature (1)..(1): n is a, c, g, or t

SEQ ID NO: 221683 - DNA, 603 bp, Canis familiaris; identical to SEQ ID NO: 11576

SEQ ID NO: 221684 - DNA, 565 bp, Canis familiaris; identical to SEQ ID NO: 11577

SEQ ID NO: 221685 - DNA, 552 bp, Canis familiaris; identical to SEQ ID NO: 11578

SEQ ID NO: 221686 - DNA, 503 bp, Canis familiaris; identical to SEQ ID NO: 11579

SEQ ID NO: 221687 - DNA, 683 bp, Canis familiaris; identical to SEQ ID NO: 11580
  misc_feature (1)..(1): n is a, c, g, or t

SEQ ID NO: 221688 - DNA, 717 bp, Canis familiaris; identical to SEQ ID NO: 11581

SEQ ID NO: 221689 - DNA, 631 bp, Canis familiaris; identical to SEQ ID NO: 11582

SEQ ID NO: 221690 - DNA, 572 bp, Canis familiaris; identical to SEQ ID NO: 11583

SEQ ID NO: 221691 - DNA, 582 bp, Canis familiaris; identical to SEQ ID NO: 11584

SEQ ID NO: 221692 - DNA, 578 bp, Canis familiaris; identical to SEQ ID NO: 11585

SEQ ID NO: 221693 - DNA, 662 bp, Canis familiaris; identical to SEQ ID NO: 11586

SEQ ID NO: 221694 - DNA, 506 bp, Canis familiaris; identical to SEQ ID NO: 11587

SEQ ID NO: 221695 - DNA, 574 bp, Canis familiaris; identical to SEQ ID NO: 11588
  misc_feature (1)..(1): n is a, c, g, or t

SEQ ID NO: 221696 - DNA, 616 bp, Canis familiaris; identical to SEQ ID NO: 11589

SEQ ID NO: 221697 - DNA, 649 bp, Canis familiaris; identical to SEQ ID NO: 11590

SEQ ID NO: 221698 - DNA, 466 bp, Canis familiaris; identical to SEQ ID NO: 11591

SEQ ID NO: 221699 - DNA, 590 bp, Canis familiaris; identical to SEQ ID NO: 11592
  misc_feature (1)..(1): n is a, c, g, or t

SEQ ID NO: 221700 - DNA, 563 bp, Canis familiaris; identical to SEQ ID NO: 11593

SEQ ID NO: 221701 - DNA, 581 bp, Canis familiaris; identical to SEQ ID NO: 11594

SEQ ID NO: 221702 - DNA, 621 bp, Canis familiaris; identical to SEQ ID NO: 11595

SEQ ID NO: 221703 - DNA, 527 bp, Canis familiaris; identical to SEQ ID NO: 11596
  misc_feature (268)..(269): n is a, c, g, or t

SEQ ID NO: 221704 - DNA, 659 bp, Canis familiaris; identical to SEQ ID NO: 11597

SEQ ID NO: 221705 - DNA, 600 bp, Canis familiaris; identical to SEQ ID NO: 11598

SEQ ID NO: 221706 - DNA, 496 bp, Canis familiaris; identical to SEQ ID NO: 11599

SEQ ID NO: 221707 - DNA, 652 bp, Canis familiaris; identical to SEQ ID NO: 11600

SEQ ID NO: 221708 - DNA, 641 bp, Canis familiaris; identical to SEQ ID NO: 11601

SEQ ID NO: 221709 - DNA, 379 bp, Canis familiaris; identical to SEQ ID NO: 11602

SEQ ID NO: 221710 - DNA, 611 bp, Canis familiaris; identical to SEQ ID NO: 11603

SEQ ID NO: 221711 - DNA, 610 bp, Canis familiaris; identical to SEQ ID NO: 11604

SEQ ID NO: 221712 - DNA, 691 bp, Canis familiaris; identical to SEQ ID NO: 11605

SEQ ID NO: 221713 - DNA, 611 bp, Canis familiaris; identical to SEQ ID NO: 11606

SEQ ID NO: 221714 - DNA, 602 bp, Canis familiaris; identical to SEQ ID NO: 11607

SEQ ID NO: 221715 - DNA, 706 bp, Canis familiaris; identical to SEQ ID NO: 11608

SEQ ID NO: 221716 - DNA, 547 bp, Canis familiaris; identical to SEQ ID NO: 11609

SEQ ID NO: 221717 - DNA, 625 bp, Canis familiaris; identical to SEQ ID NO: 11610

SEQ ID NO: 221718 - DNA, 657 bp, Canis familiaris; identical to SEQ ID NO: 11611

SEQ ID NO: 221719 - DNA, 651 bp, Canis familiaris; identical to SEQ ID NO: 11612

SEQ ID NO: 221720 - DNA, 613 bp, Canis familiaris; identical to SEQ ID NO: 11613

SEQ ID NO: 221721 - DNA, 591 bp, Canis familiaris; identical to SEQ ID NO: 11614

SEQ ID NO: 221722 - DNA, 650 bp, Canis familiaris; identical to SEQ ID NO: 11615
  misc_feature (55)..(55): n is a, c, g, or t

SEQ ID NO: 221723 - DNA, 685 bp, Canis familiaris; identical to SEQ ID NO: 11616
  misc_feature (106)..(106): n is a, c, g, or t

SEQ ID NO: 221724 - DNA, 573 bp, Canis familiaris; identical to SEQ ID NO: 11617

SEQ ID NO: 221725 - DNA, 664 bp, Canis familiaris; identical to SEQ ID NO: 11618

SEQ ID NO: 221726 - DNA, 683 bp, Canis familiaris; identical to SEQ ID NO: 11619
  misc_feature (157)..(157): n is a, c, g, or t

SEQ ID NO: 221727 - DNA, 610 bp, Canis familiaris; identical to SEQ ID NO: 11620

SEQ ID NO: 221728 - DNA, 722 bp, Canis familiaris; identical to SEQ ID NO: 11621
  misc_feature (179)..(179): n is a, c, g, or t

SEQ ID NO: 221729 - DNA, 608 bp, Canis familiaris; identical to SEQ ID NO: 11622

SEQ ID NO: 221730 - DNA, 106 bp, Canis familiaris; identical to SEQ ID NO: 11623

SEQ ID NO: 221731 - DNA, 542 bp, Canis familiaris; identical to SEQ ID NO: 11624

SEQ ID NO: 221732 - DNA, 536 bp, Canis familiaris; identical to SEQ ID NO: 11625

SEQ ID NO: 221733 - DNA, 576 bp, Canis familiaris; identical to SEQ ID NO: 11626

SEQ ID NO: 221734 - DNA, 569 bp, Canis familiaris; identical to SEQ ID NO: 11627

SEQ ID NO: 221735 - DNA, 517 bp, Canis familiaris; identical to SEQ ID NO: 11628

SEQ ID NO: 221736 - DNA, 545 bp, Canis familiaris; identical to SEQ ID NO: 11629

SEQ ID NO: 221737 - DNA, 462 bp, Canis familiaris; identical to SEQ ID NO: 11630

SEQ ID NO: 221738 - DNA, 505 bp, Canis familiaris; identical to SEQ ID NO: 11631

SEQ ID NO: 221739 - DNA, 425 bp, Canis familiaris; identical to SEQ ID NO: 11632

SEQ ID NO: 221740 - DNA, 109 bp, Canis familiaris; identical to SEQ ID NO: 11633
  misc_feature (1)..(1): n is a, c, g, or t

SEQ ID NO: 221741 - DNA, 554 bp, Canis familiaris; identical to SEQ ID NO: 11634

SEQ ID NO: 221742 - DNA, 560 bp, Canis familiaris; identical to SEQ ID NO: 11635

SEQ ID NO: 221743 - DNA, 601 bp, Canis familiaris; identical to SEQ ID NO: 11636

SEQ ID NO: 221744 - DNA, 628 bp, Canis familiaris; identical to SEQ ID NO: 11637

SEQ ID NO: 221745 - DNA, 505 bp, Canis familiaris; identical to SEQ ID NO: 11638

SEQ ID NO: 221746 - DNA, 576 bp, Canis familiaris; identical to SEQ ID NO: 11639

SEQ ID NO: 221747 - DNA, 522 bp, Canis familiaris; identical to SEQ ID NO: 11640

SEQ ID NO: 221748 - DNA, 588 bp, Canis familiaris; identical to SEQ ID NO: 11641

SEQ ID NO: 221749 - DNA, 527 bp, Canis familiaris; identical to SEQ ID NO: 11642

SEQ ID NO: 221750 - DNA, 588 bp, Canis familiaris; identical to SEQ ID NO: 11643
  misc_feature (234)..(234): n is a, c, g, or t

SEQ ID NO: 221751 - DNA, 533 bp, Canis familiaris; identical to SEQ ID NO: 11644

SEQ ID NO: 221752 - DNA, 679 bp, Canis familiaris; identical to SEQ ID NO: 11645

SEQ ID NO: 221753 - DNA, 603 bp, Canis familiaris; identical to SEQ ID NO: 11646
  misc_feature (301)..(301): n is a, c, g, or t

SEQ ID NO: 221754 - DNA, 585 bp, Canis familiaris; identical to SEQ ID NO: 11647

SEQ ID NO: 221755 - DNA, 578 bp, Canis familiaris; identical to SEQ ID NO: 11648

SEQ ID NO: 221756 - DNA, 615 bp, Canis familiaris; identical to SEQ ID NO: 11649
  misc_feature (356)..(356): n is a, c, g, or t

SEQ ID NO: 221757 - DNA, 625 bp, Canis familiaris; identical to SEQ ID NO: 11650

SEQ ID NO: 221758 - DNA, 621 bp, Canis familiaris; identical to SEQ ID NO: 11651

SEQ ID NO: 221759 - DNA, 610 bp, Canis familiaris; identical to SEQ ID NO: 11652

SEQ ID NO: 221760 - DNA, 567 bp, Canis familiaris; identical to SEQ ID NO: 11653

SEQ ID NO: 221761 - DNA, 571 bp, Canis familiaris; identical to SEQ ID NO: 11654
  misc_feature (1)..(1): n is a, c, g, or t

SEQ ID NO: 221762 - DNA, 578 bp, Canis familiaris; identical to SEQ ID NO: 11655
  misc_feature (82)..(82): n is a, c, g, or t

SEQ ID NO: 221763 - DNA, 598 bp, Canis familiaris; identical to SEQ ID NO: 11656
  misc_feature (7)..(7): n is a, c, g, or t

SEQ ID NO: 221764 - DNA, 617 bp, Canis familiaris; identical to SEQ ID NO: 11657
  misc_feature (331)..(331): n is a, c, g, or t

SEQ ID NO: 221765 - DNA, 623 bp, Canis familiaris; identical to SEQ ID NO: 11658
  misc_feature (1)..(1): n is a, c, g, or t

SEQ ID NO: 221766 - DNA, 691 bp, Canis familiaris; identical to SEQ ID NO: 11659
  misc_feature (130)..(130): n is a, c, g, or t
  misc_feature (281)..(281): n is a, c, g, or t

SEQ ID NO: 221767 - DNA, 513 bp, Canis familiaris; identical to SEQ ID NO: 11660
  misc_feature (118)..(119): n is a, c, g, or t
  misc_feature (137)..(138): n is a, c, g, or t
  misc_feature (141)..(141): n is a, c, g, or t
  misc_feature (151)..(151): n is a, c, g, or t
  misc_feature (158)..(158): n is a, c, g, or t
  misc_feature (169)..(170): n is a, c, g, or t
  misc_feature (189)..(189): n is a, c, g, or t
  misc_feature (373)..(373): n is a, c, g, or t
  misc_feature (379)..(379): n is a, c, g, or t

SEQ ID NO: 221768 - DNA, 442 bp, Canis familiaris; identical to SEQ ID NO: 11661

SEQ ID NO: 221769 - DNA, 346 bp, Canis familiaris; identical to SEQ ID NO: 11662

SEQ ID NO: 221770 - DNA, 659 bp, Canis familiaris; identical to SEQ ID NO: 11663

SEQ ID NO: 221771 - DNA, 569 bp, Canis familiaris; identical to SEQ ID NO: 11664

SEQ ID NO: 221772 - DNA, 540 bp, Canis familiaris; identical to SEQ ID NO: 11665

SEQ ID NO: 221773 - DNA, 622 bp, Canis familiaris; identical to SEQ ID NO: 11666

SEQ ID NO: 221774 - DNA, 705 bp, Canis familiaris; identical to SEQ ID NO: 11667

SEQ ID NO: 221775 - DNA, 116 bp, Canis familiaris; identical to SEQ ID NO: 11668

SEQ ID NO: 221776 - DNA, 658 bp, Canis familiaris; identical to SEQ ID NO: 11669

SEQ ID NO: 221777 - DNA, 575 bp, Canis familiaris; identical to SEQ ID NO: 11670

SEQ ID NO: 221778 - DNA, 580 bp, Canis familiaris; identical to SEQ ID NO: 11671
  misc_feature (30)..(30): n is a, c, g, or t

SEQ ID NO: 221779 - DNA, 609 bp, Canis familiaris; identical to SEQ ID NO: 11672
  misc_feature (1)..(1): n is a, c, g, or t

SEQ ID NO: 221780 - DNA, 638 bp, Canis familiaris; identical to SEQ ID NO: 11673

SEQ ID NO: 221781 - DNA, 588 bp, Canis familiaris; identical to SEQ ID NO: 11674

SEQ ID NO: 221782 - DNA, 575 bp, Canis familiaris; identical to SEQ ID NO: 11675

SEQ ID NO: 221783 - DNA, 291 bp, Canis familiaris; identical to SEQ ID NO: 11676
  misc_feature (25)..(25): n is a, c, g, or t

SEQ ID NO: 221784 - DNA, 562 bp, Canis familiaris; identical to SEQ ID NO: 11677

SEQ ID NO: 221785 - DNA, 628 bp, Canis familiaris; identical to SEQ ID NO: 11678

SEQ ID NO: 221786 - DNA, 651 bp, Canis familiaris; identical to SEQ ID NO: 11679

SEQ ID NO: 221787 - DNA, 531 bp, Canis familiaris; identical to SEQ ID NO: 11680

SEQ ID NO: 221788 - DNA, 619 bp, Canis familiaris; identical to SEQ ID NO: 11681

SEQ ID NO: 221789 - DNA, 630 bp, Canis familiaris; identical to SEQ ID NO: 11682

SEQ ID NO: 221790 - DNA, 648 bp, Canis familiaris; identical to SEQ ID NO: 11683

SEQ ID NO: 221791 - DNA, 545 bp, Canis familiaris; identical to SEQ ID NO: 11684

SEQ ID NO: 221792 - DNA, 567 bp, Canis familiaris; identical to SEQ ID NO: 11685

SEQ ID NO: 221793 - DNA, 511 bp, Canis familiaris; identical to SEQ ID NO: 11686

SEQ ID NO: 221794 - DNA, 658 bp, Canis familiaris; identical to SEQ ID NO: 11687

SEQ ID NO: 221795 - DNA, 605 bp, Canis familiaris; identical to SEQ ID NO: 11688

SEQ ID NO: 221796 - DNA, 585 bp, Canis familiaris; identical to SEQ ID NO: 11689

SEQ ID NO: 221797 - DNA, 580 bp, Canis familiaris; identical to SEQ ID NO: 11690

SEQ ID NO: 221798 - DNA, 659 bp, Canis familiaris; identical to SEQ ID NO: 11691

SEQ ID NO: 221799 - DNA, 626 bp, Canis familiaris; identical to SEQ ID NO: 11692
  misc_feature (1)..(1): n is a, c, g, or t
  misc_feature (98)..(98): n is a, c, g, or t

SEQ ID NO: 221800 - DNA, 567 bp, Canis familiaris; identical to SEQ ID NO: 11693

SEQ ID NO: 221801 - DNA, 624 bp, Canis familiaris; identical to SEQ ID NO: 11694
  misc_feature (131)..(131): n is a, c, g, or t

SEQ ID NO: 221802 - DNA, 610 bp, Canis familiaris; identical to SEQ ID NO: 11695

SEQ ID NO: 221803 - DNA, 540 bp, Canis familiaris; identical to SEQ ID NO: 11696

SEQ ID NO: 221804 - DNA, 575 bp, Canis familiaris; identical to SEQ ID NO: 11697

SEQ ID NO: 221805 - DNA, 535 bp, Canis familiaris; identical to SEQ ID NO: 11698

SEQ ID NO: 221806 - DNA, 571 bp, Canis familiaris; identical to SEQ ID NO: 11699

SEQ ID NO: 221807 - DNA, 563 bp, Canis familiaris; identical to SEQ ID NO: 11700

SEQ ID NO: 221808 - DNA, 598 bp, Canis familiaris; identical to SEQ ID NO: 11701

SEQ ID NO: 221809 - DNA, 659 bp, Canis familiaris; identical to SEQ ID NO: 11702

SEQ ID NO: 221810 - DNA, 609 bp, Canis familiaris; identical to SEQ ID NO: 11703

SEQ ID NO: 221811 - DNA, 607 bp, Canis familiaris; identical to SEQ ID NO: 11704
  misc_feature (148)..(148): n is a, c, g, or t

SEQ ID NO: 221812 - DNA, 660 bp, Canis familiaris; identical to SEQ ID NO: 11705

SEQ ID NO: 221813 - DNA, 674 bp, Canis familiaris; identical to SEQ ID NO: 11706

SEQ ID NO: 221814 - DNA, 578 bp, Canis familiaris; identical to SEQ ID NO: 11707

SEQ ID NO: 221815 - DNA, 591 bp, Canis familiaris; identical to SEQ ID NO: 11708

SEQ ID NO: 221816 - DNA, 592 bp, Canis familiaris; identical to SEQ ID NO: 11709
  misc_feature (311)..(311): n is a, c, g, or t

SEQ ID NO: 221817 - DNA, 624 bp, Canis familiaris; identical to SEQ ID NO: 11710

SEQ ID NO: 221818 - DNA, 634 bp, Canis familiaris; identical to SEQ ID NO: 11711

SEQ ID NO: 221819 - DNA, 612 bp, Canis familiaris; identical to SEQ ID NO: 11712

SEQ ID NO: 221820 - DNA, 645 bp, Canis familiaris; identical to SEQ ID NO: 11713

SEQ ID NO: 221821 - DNA, 368 bp, Canis familiaris; identical to SEQ ID NO: 11714

SEQ ID NO: 221822 - DNA, 330 bp, Canis familiaris; identical to SEQ ID NO: 11715

SEQ ID NO: 221823 - DNA, 443 bp, Canis familiaris; identical to SEQ ID NO: 11716

SEQ ID NO: 221824 - DNA, 322 bp, Canis familiaris; identical to SEQ ID NO: 11717

SEQ ID NO: 221825 - DNA, 366 bp, Canis familiaris; identical to SEQ ID NO: 11718

SEQ ID NO: 221826 - DNA, 357 bp, Canis familiaris; identical to SEQ ID NO: 11719

SEQ ID NO: 221827 - DNA, 355 bp, Canis familiaris; identical to SEQ ID NO: 11720

SEQ ID NO: 221828 - DNA, 466 bp, Canis familiaris; identical to SEQ ID NO: 11721

SEQ ID NO: 221829 - DNA, 340 bp, Canis familiaris; identical to SEQ ID NO: 11722
  misc_feature (1)..(1): n is a, c, g, or t

SEQ ID NO: 221830 - DNA, 249 bp, Canis familiaris; identical to SEQ ID NO: 11723

SEQ ID NO: 221831 - DNA, 346 bp, Canis familiaris; identical to SEQ ID NO: 11724

SEQ ID NO: 221832 - DNA, 353 bp, Canis familiaris; identical to SEQ ID NO: 11725

SEQ ID NO: 221833 - DNA, 509 bp, Canis familiaris; identical to SEQ ID NO: 11726

SEQ ID NO: 221834 - DNA, 464 bp, Canis familiaris; identical to SEQ ID NO: 11727

SEQ ID NO: 221835 - DNA, 389 bp, Canis familiaris; identical to SEQ ID NO: 11728

SEQ ID NO: 221836 - DNA, 397 bp, Canis familiaris; identical to SEQ ID NO: 11729

SEQ ID NO: 221837 - DNA, 341 bp, Canis familiaris; identical to SEQ ID NO: 11730

SEQ ID NO: 221838 - DNA, 130 bp, Canis familiaris; identical to SEQ ID NO: 11731

SEQ ID NO: 221839 - DNA, 460 bp, Canis familiaris; identical to SEQ ID NO: 11732

SEQ ID NO: 221840 - DNA, 524 bp, Canis familiaris; identical to SEQ ID NO: 11733

SEQ ID NO: 221841 - DNA, 419 bp, Canis familiaris; identical to SEQ ID NO: 11734
  misc_feature (66)..(66): n is a, c, g, or t

SEQ ID NO: 221842 - DNA, 443 bp, Canis familiaris; identical to SEQ ID NO: 11735
  misc_feature (267)..(267): n is a, c, g, or t
  misc_feature (345)..(345): n is a, c, g, or t

SEQ ID NO: 221843 - DNA, 495 bp, Canis familiaris; identical to SEQ ID NO: 11736
  misc_feature (186)..(186): n is a, c, g, or t

SEQ ID NO: 221844 - DNA, 441 bp, Canis familiaris; identical to SEQ ID NO: 11737

SEQ ID NO: 221845 - DNA, 589 bp, Canis familiaris; identical to SEQ ID NO: 11738

SEQ ID NO: 221846 - DNA, 499 bp, Canis familiaris; identical to SEQ ID NO: 11739

SEQ ID NO: 221847 - DNA, 391 bp, Canis familiaris; identical to SEQ ID NO: 11740

SEQ ID NO: 221848 - DNA, 501 bp, Canis familiaris; identical to SEQ ID NO: 11741
  misc_feature (304)..(304): n is a, c, g, or t
  misc_feature (395)..(395): n is a, c, g, or t

SEQ ID NO: 221849 - DNA, 448 bp, Canis familiaris; identical to SEQ ID NO: 11742

SEQ ID NO: 221850 - DNA, 372 bp, Canis familiaris; identical to SEQ ID NO: 11743

SEQ ID NO: 221851 - DNA, 494 bp, Canis familiaris; identical to SEQ ID NO: 11744

SEQ ID NO: 221852 - DNA, 501 bp, Canis familiaris; identical to SEQ ID NO: 11745

SEQ ID NO: 221853 - DNA, 614 bp, Canis familiaris; identical to SEQ ID NO: 11746

SEQ ID NO: 221854 - DNA, 544 bp, Canis familiaris; identical to SEQ ID NO: 11747
  misc_feature (81)..(81): n is a, c, g, or t
  misc_feature (126)..(126): n is a, c, g, or t

SEQ ID NO: 221855 - DNA, 456 bp, Canis familiaris; identical to SEQ ID NO: 11748

SEQ ID NO: 221856 - DNA, 131 bp, Canis familiaris; identical to SEQ ID NO: 11749

SEQ ID NO: 221857 - DNA, 408 bp, Canis familiaris; identical to SEQ ID NO: 11750
  misc_feature (1)..(1): n is a, c, g, or t
  misc_feature (236)..(236): n is a, c, g, or t

SEQ ID NO: 221858 - DNA, 549 bp, Canis familiaris; identical to SEQ ID NO: 11751

SEQ ID NO: 221859 - DNA, 668 bp, Canis familiaris; identical to SEQ ID NO: 11752

SEQ ID NO: 221860 - DNA, 645 bp, Canis familiaris; identical to SEQ ID NO: 11753
  misc_feature (1)..(1): n is a, c, g, or t

SEQ ID NO: 221861 - DNA, 359 bp, Canis familiaris; identical to SEQ ID NO: 11754

SEQ ID NO: 221862 - DNA, 448 bp, Canis familiaris; identical to SEQ ID NO: 11755

SEQ ID NO: 221863 - DNA, 431 bp, Canis familiaris; identical to SEQ ID NO: 11756

SEQ ID NO: 221864 - DNA, 594 bp, Canis familiaris; identical to SEQ ID NO: 11757

SEQ ID NO: 221865 - DNA, 444 bp, Canis familiaris; identical to SEQ ID NO: 11758

SEQ ID NO: 221866 - DNA, 118 bp, Canis familiaris; identical to SEQ ID NO: 11759

SEQ ID NO: 221867 - DNA, 714 bp, Canis familiaris; identical to SEQ ID NO: 11760

SEQ ID NO: 221868 - DNA, 597 bp, Canis familiaris; identical to SEQ ID NO: 11761

SEQ ID NO: 221869 - DNA, 479 bp, Canis familiaris; identical to SEQ ID NO: 11762

SEQ ID NO: 221870 - DNA, 530 bp, Canis familiaris; identical to SEQ ID NO: 11763
  misc_feature (72)..(72): n is a, c, g, or t

SEQ ID NO: 221871 - DNA, 491 bp, Canis familiaris; identical to SEQ ID NO: 11764

SEQ ID NO: 221872 - DNA, 509 bp, Canis familiaris; identical to SEQ ID NO: 11765

SEQ ID NO: 221873 - DNA, 658 bp, Canis familiaris; identical to SEQ ID NO: 11766
  misc_feature (157)..(157): n is a, c, g, or t

SEQ ID NO: 221874 - DNA, 296 bp, Canis familiaris; identical to SEQ ID NO: 11767

SEQ ID NO: 221875 - DNA, 605 bp, Canis familiaris; identical to SEQ ID NO: 11768
  misc_feature (59)..(59): n is a, c, g, or t

SEQ ID NO: 221876 - DNA, 614 bp, Canis familiaris; identical to SEQ ID NO: 11769
  misc_feature (1)..(1): n is a, c, g, or t

SEQ ID NO: 221877 - DNA, 554 bp, Canis familiaris; identical to SEQ ID NO: 11770
  misc_feature (77)..(77): n is a, c, g, or t

SEQ ID NO: 221878 - DNA, 635 bp, Canis familiaris; identical to SEQ ID NO: 11771
  misc_feature (278)..(278): n is a, c, g, or t

SEQ ID NO: 221879 - DNA, 216 bp, Canis familiaris; identical to SEQ ID NO: 11772

SEQ ID NO: 221880 - DNA, 565 bp, Canis familiaris; identical to SEQ ID NO: 11773

SEQ ID NO: 221881 - DNA, 583 bp, Canis familiaris; identical to SEQ ID NO: 11774
  misc_feature (374)..(374): n is a, c, g, or t

SEQ ID NO: 221882 - DNA, 597 bp, Canis familiaris; identical to SEQ ID NO: 11775

SEQ ID NO: 221883 - DNA, 519 bp, Canis familiaris; identical to SEQ ID NO: 11776

SEQ ID NO: 221884 - DNA, 605 bp, Canis familiaris; identical to SEQ ID NO: 11777

SEQ ID NO: 221885 - DNA, 587 bp, Canis familiaris; identical to SEQ ID NO: 11778

SEQ ID NO: 221886 - DNA, 102 bp, Canis familiaris; identical to SEQ ID NO: 11779
  misc_feature (1)..(1): n is a, c, g, or t

SEQ ID NO: 221887 - DNA, 614 bp, Canis familiaris; identical to SEQ ID NO: 11780

SEQ ID NO: 221888 - DNA, 641 bp, Canis familiaris; identical to SEQ ID NO: 11781

SEQ ID NO: 221889 - DNA, 550 bp, Canis familiaris; identical to SEQ ID NO: 11782

SEQ ID NO: 221890 - DNA, 629 bp, Canis familiaris; identical to SEQ ID NO: 11783

SEQ ID NO: 221891 - DNA, 613 bp, Canis familiaris; identical to SEQ ID NO: 11784

SEQ ID NO: 221892 - DNA, 513 bp, Canis familiaris; identical to SEQ ID NO: 11785

SEQ ID NO: 221893 - DNA, 538 bp, Canis familiaris; identical to SEQ ID NO: 11786

SEQ ID NO: 221894 - DNA, 132 bp, Canis familiaris; identical to SEQ ID NO: 11787

SEQ ID NO: 221895 - DNA, 504 bp, Canis familiaris; identical to SEQ ID NO: 11788

SEQ ID NO: 221896 - DNA, 572 bp, Canis familiaris; identical to SEQ ID NO: 11789

SEQ ID NO: 221897 - DNA, 548 bp, Canis familiaris; identical to SEQ ID NO: 11790

SEQ ID NO: 221898 - DNA, 631 bp, Canis familiaris; identical to SEQ ID NO: 11791

SEQ ID NO: 221899 - DNA, 625 bp, Canis familiaris; identical to SEQ ID NO: 11792

SEQ ID NO: 221900 - DNA, 596 bp, Canis familiaris; identical to SEQ ID NO: 11793

SEQ ID NO: 221901 - DNA, 641 bp, Canis familiaris; identical to SEQ ID NO: 11794

SEQ ID NO: 221902 - DNA, 591 bp, Canis familiaris; identical to SEQ ID NO: 11795

SEQ ID NO: 221903 - DNA, 648 bp, Canis familiaris; identical to SEQ ID NO: 11796

SEQ ID NO: 221904 - DNA, 552 bp, Canis familiaris; identical to SEQ ID NO: 11797

SEQ ID NO: 221905 - DNA, 633 bp, Canis familiaris; identical to SEQ ID NO: 11798

SEQ ID NO: 221906 - DNA, 571 bp, Canis familiaris; identical to SEQ ID NO: 11799

SEQ ID NO: 221907 - DNA, 609 bp, Canis familiaris; identical to SEQ ID NO: 11800

SEQ ID NO: 221908 - DNA, 478 bp, Canis familiaris; identical to SEQ ID NO: 11801

SEQ ID NO: 221909 - DNA, 711 bp, Canis familiaris; identical to SEQ ID NO: 11802

SEQ ID NO: 221910 - DNA, 363 bp, Canis familiaris; identical to SEQ ID NO: 11803

SEQ ID NO: 221911 - DNA, 495 bp, Canis familiaris; identical to SEQ ID NO: 11804

SEQ ID NO: 221912 - DNA, 568 bp, Canis familiaris; identical to SEQ ID NO: 11805

SEQ ID NO: 221913 - DNA, 495 bp, Canis familiaris; identical to SEQ ID NO: 11806

SEQ ID NO: 221914 - DNA, 610 bp, Canis familiaris; identical to SEQ ID NO: 11807
  misc_feature (356)..(356): n is a, c, g, or t

SEQ ID NO: 221915 - DNA, 698 bp, Canis familiaris; identical to SEQ ID NO: 11808

SEQ ID NO: 221916 - DNA, 545 bp, Canis familiaris; identical to SEQ ID NO: 11809
  misc_feature (1)..(1): n is a, c, g, or t

SEQ ID NO: 221917 - DNA, 495 bp, Canis familiaris; identical to SEQ ID NO: 11810

SEQ ID NO: 221918 - DNA, 598 bp, Canis familiaris; identical to SEQ ID NO: 11811

SEQ ID NO: 221919 - DNA, 659 bp, Canis familiaris; identical to SEQ ID NO: 11812

SEQ ID NO: 221920 - DNA, 624 bp, Canis familiaris; identical to SEQ ID NO: 11813

SEQ ID NO: 221921 - DNA, 117 bp, Canis familiaris; identical to SEQ ID NO: 11814
  misc_feature (1)..(1): n is a, c, g, or t

SEQ ID NO: 221922 - DNA, 695 bp, Canis familiaris; identical to SEQ ID NO: 11815

SEQ ID NO: 221923 - DNA, 595 bp, Canis familiaris; identical to SEQ ID NO: 11816
  misc_feature (1)..(1): n is a, c, g, or t

SEQ ID NO: 221924 - DNA, 594 bp, Canis familiaris; identical to SEQ ID NO: 11817

SEQ ID NO: 221925 - DNA, 556 bp, Canis familiaris; identical to SEQ ID NO: 11818

SEQ ID NO: 221926 - DNA, 735 bp, Canis familiaris; identical to SEQ ID NO: 11819

SEQ ID NO: 221927 - DNA, 566 bp, Canis familiaris; identical to SEQ ID NO: 11820

SEQ ID NO: 221928 - DNA, 653 bp, Canis familiaris; identical to SEQ ID NO: 11821

SEQ ID NO: 221929 - DNA, 422 bp, Canis familiaris; identical to SEQ ID NO: 11822

SEQ ID NO: 221930 - DNA, 578 bp, Canis familiaris; identical to SEQ ID NO: 11823

SEQ ID NO: 221931 - DNA, 457 bp, Canis familiaris; identical to SEQ ID NO: 11824

SEQ ID NO: 221932 - DNA, 478 bp, Canis familiaris; identical to SEQ ID NO: 11825
  misc_feature (106)..(106): n is a, c, g, or t

SEQ ID NO: 221933 - DNA, 642 bp, Canis familiaris; identical to SEQ ID NO: 11826
  misc_feature (112)..(112): n is a, c, g, or t

SEQ ID NO: 221934 - DNA, 572 bp, Canis familiaris; identical to SEQ ID NO: 11827
  misc_feature (124)..(124): n is a, c, g, or t

SEQ ID NO: 221935 - DNA, 568 bp, Canis familiaris; identical to SEQ ID NO: 11828

SEQ ID NO: 221936 - DNA, 516 bp, Canis familiaris; identical to SEQ ID NO: 11829

SEQ ID NO: 221937 - DNA, 620 bp, Canis familiaris; identical to SEQ ID NO: 11830

SEQ ID NO: 221938 - DNA, 539 bp, Canis familiaris; identical to SEQ ID NO: 11831

SEQ ID NO: 221939 - DNA, 629 bp, Canis familiaris; identical to SEQ ID NO: 11832

SEQ ID NO: 221940 - DNA, 671 bp, Canis familiaris; identical to SEQ ID NO: 11833

SEQ ID NO: 221941 - DNA, 721 bp, Canis familiaris; identical to SEQ ID NO: 11834

SEQ ID NO: 221942 - DNA, 646 bp, Canis familiaris; identical to SEQ ID NO: 11835

SEQ ID NO: 221943 - DNA, 680 bp, Canis familiaris; identical to SEQ ID NO: 11836

SEQ ID NO: 221944 - DNA, 479 bp, Canis familiaris; identical to SEQ ID NO: 11837

SEQ ID NO: 221945 - DNA, 608 bp, Canis familiaris; identical to SEQ ID NO: 11838

SEQ ID NO: 221946 - DNA, 402 bp, Canis familiaris; identical to SEQ ID NO: 11839

SEQ ID NO: 221947 - DNA, 529 bp, Canis familiaris; identical to SEQ ID NO: 11840

SEQ ID NO: 221948 - DNA, 463 bp, Canis familiaris; identical to SEQ ID NO: 11841
  misc_feature (57)..(57): n is a, c, g, or t
  misc_feature (64)..(64): n is a, c, g, or t

SEQ ID NO: 221949 - DNA, 507 bp, Canis familiaris; identical to SEQ ID NO: 11842
  misc_feature (98)..(98): n is a, c, g, or t
  misc_feature (176)..(176): n is a, c, g, or t
  misc_feature (178)..(178): n is a, c, g, or t
  misc_feature (185)..(185): n is a, c, g, or t

SEQ ID NO: 221950 - DNA, 427 bp, Canis familiaris; identical to SEQ ID NO: 11843

SEQ ID NO: 221951 - DNA, 596 bp, Canis familiaris; identical to SEQ ID NO: 11844

SEQ ID NO: 221952 - DNA, 461 bp, Canis familiaris; identical to SEQ ID NO: 11845

SEQ ID NO: 221953 - DNA, 606 bp, Canis familiaris; identical to SEQ ID NO: 11846

SEQ ID NO: 221954 - DNA, 654 bp, Canis familiaris; identical to SEQ ID NO: 11847

SEQ ID NO: 221955 - DNA, 628 bp, Canis familiaris; identical to SEQ ID NO: 11848

SEQ ID NO: 221956 - DNA, 605 bp, Canis familiaris; identical to SEQ ID NO: 11849
  misc_feature (1)..(1): n is a, c, g, or t

SEQ ID NO: 221957 - DNA, 395 bp, Canis familiaris; identical to SEQ ID NO: 11850
  misc_feature (1)..(1): n is a, c, g, or t

SEQ ID NO: 221958 - DNA, 493 bp, Canis familiaris; identical to SEQ ID NO: 11851

SEQ ID NO: 221959 - DNA, 552 bp, Canis familiaris; identical to SEQ ID NO: 11852

SEQ ID NO: 221960 - DNA, 588 bp, Canis familiaris; identical to SEQ ID NO: 11853

SEQ ID NO: 221961 - DNA, 612 bp, Canis familiaris; identical to SEQ ID NO: 11854
  misc_feature (163)..(163): n is a, c, g, or t
  misc_feature (174)..(174): n is a, c, g, or t
  misc_feature (279)..(279): n is a, c, g, or t
  misc_feature (295)..(295): n is a, c, g, or t
  misc_feature (399)..(399): n is a, c, g, or t
  misc_feature (441)..(441): n is a, c, g, or t

SEQ ID NO: 221962 - DNA, 643 bp, Canis familiaris; identical to SEQ ID NO: 11855

SEQ ID NO: 221963 - DNA, 581 bp, Canis familiaris; identical to SEQ ID NO: 11856

SEQ ID NO: 221964 - DNA, 583 bp, Canis familiaris; identical to SEQ ID NO: 11857

SEQ ID NO: 221965 - DNA, 627 bp, Canis familiaris; identical to SEQ ID NO: 11858
  misc_feature (336)..(336): n is a, c, g, or t

SEQ ID NO: 221966 - DNA, 546 bp, Canis familiaris; identical to SEQ ID NO: 11859

SEQ ID NO: 221967 - DNA, 544 bp, Canis familiaris; identical to SEQ ID NO: 11860

SEQ ID NO: 221968 - DNA, 527 bp, Canis familiaris; identical to SEQ ID NO: 11861
  misc_feature (375)..(375): n is a, c, g, or t
  misc_feature (392)..(392): n is a, c, g, or t
  misc_feature (412)..(412): n is a, c, g, or t
  misc_feature (419)..(419): n is a, c, g, or t
  misc_feature (435)..(435): n is a, c, g, or t

SEQ ID NO: 221969 - DNA, 661 bp, Canis familiaris; identical to SEQ ID NO: 11862

SEQ ID NO: 221970 - DNA, 451 bp, Canis familiaris; identical to SEQ ID NO: 11863

SEQ ID NO: 221971 - DNA, 649 bp, Canis familiaris; identical to SEQ ID NO: 11864
  misc_feature (341)..(341): n is a, c, g, or t

SEQ ID NO: 221972 - DNA, 551 bp, Canis familiaris; identical to SEQ ID NO: 11865

SEQ ID NO: 221973 - DNA, 577 bp, Canis familiaris; identical to SEQ ID NO: 11866

SEQ ID NO: 221974 - DNA, 160 bp, Canis familiaris; identical to SEQ ID NO: 11867

SEQ ID NO: 221975 - DNA, 468 bp, Canis familiaris; identical to SEQ ID NO: 11868

SEQ ID NO: 221976 - DNA, 649 bp, Canis familiaris; identical to SEQ ID NO: 11869

SEQ ID NO: 221977 - DNA, 564 bp, Canis familiaris; identical to SEQ ID NO: 11870
  misc_feature (29)..(29): n is a, c, g, or t

SEQ ID NO: 221978 - DNA, 598 bp, Canis familiaris; identical to SEQ ID NO: 11871

SEQ ID NO: 221979 - DNA, 618 bp, Canis familiaris; identical to SEQ ID NO: 11872

SEQ ID NO: 221980 - DNA, 686 bp, Canis familiaris; identical to SEQ ID NO: 11873
  misc_feature (72)..(72): n is a, c, g, or t
  misc_feature (74)..(74): n is a, c, g, or t

SEQ ID NO: 221981 - DNA, 563 bp, Canis familiaris; identical to SEQ ID NO: 11874

SEQ ID NO: 221982 - DNA, 587 bp, Canis familiaris; identical to SEQ ID NO: 11875

SEQ ID NO: 221983 - DNA, 591 bp, Canis familiaris; identical to SEQ ID NO: 11876

SEQ ID NO: 221984 - DNA, 419 bp, Canis familiaris; identical to SEQ ID NO: 11877

SEQ ID NO: 221985 - DNA, 671 bp, Canis familiaris; identical to SEQ ID NO: 11878

SEQ ID NO: 221986 - DNA, 543 bp, Canis familiaris; identical to SEQ ID NO: 11879

SEQ ID NO: 221987 - DNA, 240 bp, Canis familiaris; identical to SEQ ID NO: 11880

SEQ ID NO: 221988 - DNA, 610 bp, Canis familiaris; identical to SEQ ID NO: 11881
  misc_feature (10)..(10): n is a, c, g, or t

SEQ ID NO: 221989 - DNA, 672 bp, Canis familiaris; identical to SEQ ID NO: 11882

SEQ ID NO: 221990 - DNA, 571 bp, Canis familiaris; identical to SEQ ID NO: 11883

SEQ ID NO: 221991 - DNA, 544 bp, Canis familiaris; identical to SEQ ID NO: 11884

SEQ ID NO: 221992 - DNA, 542 bp, Canis familiaris; identical to SEQ ID NO: 11885

SEQ ID NO: 221993 - DNA, 623 bp, Canis familiaris; identical to SEQ ID NO: 11886

SEQ ID NO: 221994 - DNA, 664 bp, Canis familiaris; identical to SEQ ID NO: 11887

SEQ ID NO: 221995 - DNA, 367 bp, Canis familiaris; identical to SEQ ID NO: 11888

SEQ ID NO: 221996 - DNA, 639 bp, Canis familiaris; identical to SEQ ID NO: 11889

SEQ ID NO: 221997 - DNA, 620 bp, Canis familiaris; identical to SEQ ID NO: 11890

SEQ ID NO: 221998 - DNA, 328 bp, Canis familiaris; identical to SEQ ID NO: 11891

SEQ ID NO: 221999 - DNA, 577 bp, Canis familiaris; identical to SEQ ID NO: 11892

SEQ ID NO: 222000 - DNA, 592 bp, Canis familiaris; identical to SEQ ID NO: 11893

SEQ ID NO: 222001 - DNA, 614 bp, Canis familiaris; identical to SEQ ID NO: 11894

SEQ ID NO: 222002 - DNA, 462 bp, Canis familiaris; identical to SEQ ID NO: 11895

SEQ ID NO: 222003 - DNA, 490 bp, Canis familiaris; identical to SEQ ID NO: 11896
  misc_feature (267)..(267): n is a, c, g, or t

SEQ ID NO: 222004 - DNA, 636 bp, Canis familiaris; identical to SEQ ID NO: 11897

SEQ ID NO: 222005 - DNA, 135 bp, Canis familiaris; identical to SEQ ID NO: 11898

SEQ ID NO: 222006 - DNA, 346 bp, Canis familiaris; identical to SEQ ID NO: 11899

SEQ ID NO: 222007 - DNA, 646 bp, Canis familiaris; identical to SEQ ID NO: 11900

SEQ ID NO: 222008 - DNA, 567 bp, Canis familiaris; identical to SEQ ID NO: 11901
  misc_feature (243)..(243): n is a, c, g, or t

SEQ ID NO: 222009 - DNA, 514 bp, Canis familiaris; identical to SEQ ID NO: 11902

SEQ ID NO: 222010 - DNA, 602 bp, Canis familiaris; identical to SEQ ID NO: 11903

SEQ ID NO: 222011 - DNA, 579 bp, Canis familiaris; identical to SEQ ID NO: 11904

SEQ ID NO: 222012 - DNA, 655 bp, Canis familiaris; identical to SEQ ID NO: 11905
  misc_feature (235)..(235): n is a, c, g, or t

SEQ ID NO: 222013 - DNA, 109 bp, Canis familiaris; identical to SEQ ID NO: 11906

SEQ ID NO: 222014 - DNA, 571 bp, Canis familiaris; identical to SEQ ID NO: 11907

SEQ ID NO: 222015 - DNA, 594 bp, Canis familiaris; identical to SEQ ID NO: 11908

SEQ ID NO: 222016 - DNA, 642 bp, Canis familiaris; identical to SEQ ID NO: 11909

SEQ ID NO: 222017 - DNA, 377 bp, Canis familiaris; identical to SEQ ID NO: 11910
  misc_feature (217)..(218): n is a, c, g, or t

SEQ ID NO: 222018 - DNA, 217 bp, Canis familiaris; identical to SEQ ID NO: 11911

SEQ ID NO: 222019 - DNA, 632 bp, Canis familiaris; identical to SEQ ID NO: 11912

SEQ ID NO: 222020 - DNA, 652 bp, Canis familiaris; identical to SEQ ID NO: 11913

SEQ ID NO: 222021 - DNA, 595 bp, Canis familiaris; identical to SEQ ID NO: 11914
  misc_feature (333)..(333): n is a, c, g, or t

SEQ ID NO: 222022 - DNA, 484 bp, Canis familiaris; identical to SEQ ID NO: 11915

SEQ ID NO: 222023 - DNA, 560 bp, Canis familiaris; identical to SEQ ID NO: 11916

SEQ ID NO: 222024 - DNA, 604 bp, Canis familiaris; identical to SEQ ID NO: 11917

SEQ ID NO: 222025 - DNA, 530 bp, Canis familiaris; identical to SEQ ID NO: 11918

SEQ ID NO: 222026 - DNA, 628 bp, Canis familiaris; identical to SEQ ID NO: 11919
  misc_feature (24)..(24): n is a, c, g, or t

SEQ ID NO: 222027 - DNA, 447 bp, Canis familiaris; identical to SEQ ID NO: 11920

SEQ ID NO: 222028 - DNA, 499 bp, Canis familiaris; identical to SEQ ID NO: 11921

SEQ ID NO: 222029 - DNA, 647 bp, Canis familiaris; identical to SEQ ID NO: 11922

SEQ ID NO: 222030 - DNA, 615 bp, Canis familiaris; identical to SEQ ID NO: 11923

SEQ ID NO: 222031 - DNA, 547 bp, Canis familiaris; identical to SEQ ID NO: 11924

SEQ ID NO: 222032 - DNA, 589 bp, Canis familiaris; identical to SEQ ID NO: 11925

SEQ ID NO: 222033 - DNA, 666 bp, Canis familiaris; identical to SEQ ID NO: 11926

SEQ ID NO: 222034 - DNA, 650 bp, Canis familiaris; identical to SEQ ID NO: 11927
  misc_feature (176)..(176): n is a, c, g, or t

SEQ ID NO: 222035 - DNA, 300 bp, Canis familiaris; identical to SEQ ID NO: 11928
  misc_feature (1)..(1): n is a, c, g, or t

SEQ ID NO: 222036 - DNA, 519 bp, Canis familiaris; identical to SEQ ID NO: 11929
  misc_feature (5)..(5): n is a, c, g, or t

SEQ ID NO: 222037 - DNA, 612 bp, Canis familiaris; identical to SEQ ID NO: 11930

SEQ ID NO: 222038 - DNA, 262 bp, Canis familiaris; identical to SEQ ID NO: 11931
  misc_feature (22)..(22): n is a, c, g, or t

SEQ ID NO: 222039 - DNA, 475 bp, Canis familiaris; identical to SEQ ID NO: 11932

SEQ ID NO: 222040 - DNA, 674 bp, Canis familiaris; identical to SEQ ID NO: 11933
  misc_feature (147)..(147): n is a, c, g, or t

SEQ ID NO: 222041 - DNA, 669 bp, Canis familiaris; identical to SEQ ID NO: 11934

SEQ ID NO: 222042 - DNA, 657 bp, Canis familiaris; identical to SEQ ID NO: 11935

SEQ ID NO: 222043 - DNA, 578 bp, Canis familiaris; identical to SEQ ID NO: 11936

SEQ ID NO: 222044 - DNA, 644 bp, Canis familiaris; identical to SEQ ID NO: 11937

SEQ ID NO: 222045 - DNA, 529 bp, Canis familiaris; identical to SEQ ID NO: 11938

SEQ ID NO: 222046 - DNA, 562 bp, Canis familiaris; identical to SEQ ID NO: 11939

SEQ ID NO: 222047 - DNA, 600 bp, Canis familiaris
tgtcctaataaagctcaaccgagttctgggcttcaaacctaagcctcccaagaatgagtccctggaggcttacccagtgatgaaatacagtccttacgtcctgccggttcagtgcactggcaagcgagacgaagacaaggatagaattgggaacgtggagtattttggcctgggcggctacccgggctttcctctgcaatattacccctactacggcaagttgctccagcccaagtatctgcagcccctgctcgccgtgcagttcaccaacctcaccatggacactgaaattcgcatcgagtgtaaggcttacggggagaacattggttacagtgagaaagaccgttttcagggacgctttgatgtaaaaattgaagttaagagctgatcacaagcacaaatctttcccactagccatttaaaaaaagttaaaaaaaagatacaaaaaacaaaaacctactagtcttggaataaactgtcatacgtatgggacctacacttaatctatatgctttacactagctttctgcatttaataggttagaatgtaaatttaaagtgtagcaatagcaagaaaatatttattctactgtaaatgac

SEQ ID NO: 222048 - DNA, 1400 bp, Canis familiaris
tcggcgtccaacaacgagacctactgccgctccttctaccccgagcacagcgtcaaggagtggctcatcagcatggagctggtctcggtggtcctgggcttcgccatccccttctgcgtcatcgccgtcttctactgcctgctggcccgcgccatctccgcgtccagcgaccaggagaagcagagcagccgaaagatcatcttctcctacgtggtggtcttcctcgtgtgctggctcccctaccacgtggtggtgctcctggacatcttctccatccttcactacatccccttcacctgccagctggagaacttcctcttcacggctctgcacgtcacgcagtgcctgtctctggtgcactgctgcgtcaaccccgtgctctatagcttcatcaaccgtaactacagatacgagctgatgaaggccttcatctttaagtactcggccaagacgggtctcaccaagctcatcgatgcctccagggtgtcggagacggagtactccgccttggagcaaaacgccaagtgacaggccccgcggggcctcggggacaagcgtgcgcgcttcctacacggcgctgggttgcatcgtctccaagagttcaagcaaggcgccttggggcttgaggcctgagtcgcgtgaagtggggaagcaggtgccaccgtgggcccttctcctctttgtccggctgccggggtggctgtcacggggccgtcgtgcctgcaggcgtgggccgtgctgcgtgaccctactacttactcgtccaagccggttgccggcgggctcgcctgcacttctgtaaaataggactttctgtgttccctggaggttttacttggtgacttgtatttaagttttaagactttattttctcattatcggcgtaccttataaatgtacttgaaagtttaaatatattttataaaaatcgtatgggcgctgtcacatacgatacatatacatacgctgacatatattcagagcgttgtagttttaactagtttgatttcagttttgactaaggatgacattaattgttagctgttttgaaattttatatatatatataaatataaatataaatatataaatatataaatatatgccggtctgggctgaaatgttttatttacgatagttttatatctgtgtggtgctttgctacctgcatgggatatgggacaagaaggacgctgtaaagcagtttgtgatattaattgtatcgtaaagttacattaaaaatgcgaaacgaagcggaacctctccaggctgcagcgccgcgcacaaagttttgaacagtcttatttcggagagttctctcaatttgtaagttatttttctttttttttttttttaataaagatttgtttttcctaaaaaaggcaaaaaaaaaaaaaaaa

SEQ ID NO: 222049 - DNA, 600 bp, Canis familiaris
ggaaccgcatcctgaatccgccttcgctgtacgggaagcgcttcaccacagcgcagctcatcacgggctccgcggggtcctcgctctgctccctgagccccagcctccaagaggagcgctcgcatgcggccggcccccctctctttttcaaccacgtgcaagtcaagctggccgagggtgtcctggagcgcaagaggatttcggcggcccgagaaagaaaagccaccaaaaccctggggatcatcctgggggcctttatcgtctgctggctgcccttctttgttgcatctctggtcctccccatctgccgggcctcctgctggctccacccagccctctttgacttcttcacctggctaggctatctcaactctctcatcaacccaataatatacactgtgtttaacgaagagtttcggcaagcgtttcagagggttgtccatgtccggaaagcctcctagtctgatttgctggtgactcttgtcatccggtgtgtcctgtaacccagctggaattgtcttgtttcgttttcctgagatttgggtcaatcctgatgtcttgggttttggttccatcaatagaattgttcagtgagaaaaa

SEQ ID NO: 222050 - DNA, 600 bp, Canis familiaris
gccgcggccgccgggactcgggcccgctcttcaccttcaggctcctggcggagcgcgggagccccgcggccggagacggggcctgccggcccgcgcccgacgcggccaacgggcagcccggcttcaagaccaacatgcccctggcgcccgggcagttttaggggggcctgcgggggggaggggggcgaaaccaccgtggggggagggcgggcgaggggggagggcggcggcgcccgggggaggcgggggggcggggggcagctgctttgctggcaggggcatgggtgccaggtacagcggagggctgggcgagcatgccgagagcctggggccccgacgccggccgggatgtccgtctgtctctctgtacatatccaaacgagtccctgtgtgcacgtatttaaccgtgggtacacgtgcgtgtgtctgtgcggtgtccgtgtggtctgcgtgcgcgcgtgggtgcggccaccggggggggggcagcgggggcgccgtcggcccgggacctcgcgcccctccagccgctccccggccctccccgagtggcggatggccctgggcccgggtcggaaacaaatcggacattaaaggtcgttg

SEQ ID NO: 222051 - DNA, 1400 bp, Canis familiaris
ccggaagcccagcatcctcatgtacatcgccatcttcctcacgcacggcaactcggccatgaaccccatcgtctacgccttccgcatccagaagttccgggtcaccttccttaagatctggaatgaccacttccgctgccagcccacgccccccgtcgacgaggaccccccagaggaggcgccccacgactagacgccaccttctcccgcctgcccacgtcgggggcgtctccgccccggcccacccccccactgacccactcctgagccctcccggctgggctgcggggtgtgggcgcctgcaccttgggtcctagaggaggtttgggaggacggcccacggcgaaggaaccgggtgccctgaggagacggagaaagtggctcgagcctccccagctgtgtgaccggcccacgggcagcccggtgcttcaggccagacggacctggggacactggggctgcgggggtcccgtggggcccggaaggcaagcttgggctcccgtggaggtcagggagccgcttgtcgctggtgctgctgctgaagccctggaacagagcccgaggacgggggaggtcccctccgagatgcaggggatggagagaagctggacatcaaggtcttgcttcctctcctgttctgtagaaggtgggagagcccctgggcaggaatcaggggtcctcagcccctgcctcccgggaccctgagctcctagccacgctgggtgccgggggcctgcccctcttgccccagggcaaccgggtttgcacttgggatgggcgggaagagcgggtccagaaatcattcccaacctttacttgatcctccaccagcccctggcccctgtcgaagggcctgccacacacagccaccaggtggcagccccgcgccggctcagccgagccccccaggagcgggagcagcggggctgtgaggggccacctgggctaccgccccattagccctagaggatgcctgcactctcctaagtgacactggctgctgcttctgggccggggacaggggggcgcagcctccggccttgcgagcgctgcccgtgggcgctcccggtgtgacttggcacaggctgcaccgcctgaggctgaggcaggaaggtcttgctggcatttaaataccctcaggacccctggcacttagcagtttccagggcctttggggctctgcacggtctagatgggctttagcgcatccagggaagggtccgccctctgccaagctcagggcccggggcccttgtccagggggtgggggcggggttcggagtgtgaacagcagctctaggcctggattccagacccttccctttctcagaggtaggctcttccctggctcccaggggggccaccttctaataaaagactgtgggtcttgaaaaaaaaaa

SEQ ID NO: 222052 - DNA, 1400 bp, Canis familiaris
cgccctctgctggctgcccctgcatatcatcaactgctttaccttcttttgcccagagtgtagccatgccccactctggctcatgtacctgaccatcgtcctctcccacaccaattctgttgtgaatcccttcatctatgcctaccgcatccgtgagtttcgccagaccttccgcaagatcattcgcagccacgtcctgaggcggcgggagcccttcaaagcaggtggcaccagtgcccgcgccttggcagctcatggcagtgatggagagcagatcagcctccgcctcaatggccatcctcctggggtgtgggccaatggcagcgccccccatcctgagcggcggcccaatggctacaccctggggctggtgagtggagggattgcccctgagtcccatggcgacatgggcctcccagatgtggagctcctcagccatgagctcaagggagcatgcccagagtcccctggccttgaaggtcccctggcccaggatggagcaggagtgtcctgatgatccactcagtttgcctcttcctacaggaaggaaatctttctctttggtggatagaaccagtcacattgggaaaagaatgaatgtgcctggagacccttctcgtggccagttcccactttggactgagaggagggagccctggctggagcagcatgtggcctagcaggaagggtttggagtccaagaaagtggacgtttcacatcagaaggcccagcatcaggtcagggccacagcacagagcatcttggctgggcagggcctggtcccccactctggaagcatctagaagtaccatcctgatgtggcagggcaggctaactggccctgaggctgtgggggtggctccaacaggccccctaccacacacagacaacaccctccccagacttttcaaggattcaggagctgctatgcccagaggtggcgtttttcatttctttctttcttttttctcttttttttttccaggagaaaatgttaaacgtgaagaatgcctttttttttttttttaattattttccttccctggttgccaggtctgttgtcagtcctgctgctaacctagctccaggagtcagcccagggagtcccagacagccctgtctggctaccatgaactgccacgcacttcttacaccatcagtcccagggccatctcttggggtcacaaagctgggctcaaggacagggagctgtaatggatttgctgccagactgtgggctcaggggaggagatcgggactggctcaccatgcggtgtgcctgggtagctcagagctgcccggtcagaggccctttctaactgcctttccttccgaaggaatgtttttttctgagataaaataaaaatgagccatgttgtgttttaaaaaaaaaaaaaaa

SEQ ID NO: 222053 - DNA, 169 bp, Canis familiaris
cggtcctgggtgcggagctcagcacaggcccggacagcaggggggagaagcctgctcccagtgcaccctggcggccccgccgatccaagcgctgctcctgctcttccctgatggataaagagtgtgtctacttctgccaccttgacatcatctgggtcaacactcctga

SEQ ID NO: 222054 - DNA, 1400 bp, Canis familiaris
aaggagtggagaaattcaaaaatgaaaattttgaaattattattgttgatacaagtggacgccataaacaggaagactctttgtttgaagaaatgcttcaagttgctaacgctatacaacctgataacattgtttatgtgatggatgcctccattggacaggcttgtgaagcccaggcaaaggcttttaaagataaagtagatgtagcttcggtaatagtgacaaaacttgatggccatgcaaaaggaggtggtgcactcagtgcagttgctgccacaaaaagtccaattattttcattggtacaggggaacacatagatgattttgaacctttcaaaacacagccttttatcagcaagcttcttggtatgggtgacatcgaaggactgatagataaagtcaatgagttgaagttggatgacaatgaagcacttatagagaagttaaaacatggtcagtttacgttgcgagacatgtatgaacaatttcaaaatatcatgaagatgggccccttcagtcagatcttgggtatgatccctggttttggtacagattttatgagcaaaggaaatgaacaagagtcaatggcaaggctaaaaaagttaatgacgataatggatagtatgaatgatcaagaacttgacagtactgatggtgccaaggtttttagtaagcaaccaggaagaatccagagagtagcaagaggatcaggtgtgtcaacaagagatgttcaagaacttttgacacaatataccaaatttgcacagatggtaaaaaagatgggaggtatcaaaggacttttcaaaggtggtgacatgtctaagaatgtgagccagtcacagatggcaaaactgaatcaacaaatggccaaaatgatggatccaagagttcttcatcacatgggtggtatggcaggacttcagtccatgatgaggcagtttcaacagggtgctgctggcaatatgaaaggcatgatgggattcaataatatgtaaagaagatgccttaatttaaactgactcagttgattacattatttgctgagacctcaagagtttccctcctttttgcaaacaggaaaaaaaaagtatttttcttgcctgtcttgccctttttctttctcttctcatcttctttccttcctacttccttccctccctttgatataagggaggaatatatagtttttgtggaaatcattatatttttgctttagattttcttttcttagttttcaccatcataatacttcttaagttaaacaaatcatgatgtaaaatctagtacttagaagtttctaattgtctcaaaggccaagcattacatttgtaaacagtcctgatcagtagttatatgatgtctcaataaaagtgctgtaaaataaacttcaaactcgttat

SEQ ID NO: 222055 - DNA, 769 bp, Canis familiaris; identical to SEQ ID NO: 11948

SEQ ID NO: 222056 - DNA, 1400 bp, Canis familiaris
gaggaaggaggcagagaaaggcaaggccatcaacttgaaagatgtctttggagcctacagcatggatgtgattaccagcacatcgtttggagtgaacattgattccctcaaccacccacaagatccgtttgtggaaaataccaagaagctcttaaaatttgatttccttgacccatttttcttctccatattactgtttccattccttactccggtttttgaaatattaaatatctggctatttccaaagaaagttactgattttttcagaaaatctgtagagagaatgaaggaaagtcgcctaaaagataaacaaaagcaccgagtggactttcttcagctgatgattaactcccagaattccaaagaaatggacactcataaagctctatctgatttggagctggtggcccaatctattatctttatttttgctggctatgagaccactagcacttctctttccttccttatgtatgaattggccactcaccctgatgtccagcagaaactgcaggaggagattgatgcgactttccccaataaggcattgcccacttacgatgcccttgtgcagatggaatatctggacatggtgttgaatgaaactctccgattatacccaatcgctggtagacttgagagggtctgtaagaaagatgtggaaatcagtggtgtgttcattcccaaagggacagtggtgatggtgccaacctttactcttcatcgagaccagagtctctggccagagcctgaggaattccgacctgaaaggttcagtaggaagaacaaggacagcataaatccttatacatacctgccttttggaactggaccccgaaactgcattggaatgaggtttgcgatcatgaacatgaaacttgcccttgttagggtcctgcagaacttctccttcaaaccttgtaaagaaacacagatccccctgaaattaaatgctcaagggattattcaacctgaaaagcccattgttctcaaggttgagccaagagatgggagtgtaaatggagcctgactttccctaaggacttccttttgttcttcaagaaactatcccagaacaccagagacctcaatttcctttgattatgtggtttcactcatgtagggaatataagaaatagtgaaaggggttgtaggggaaagaagggaaaatgagtgggaaaaattagagagggtgacacagaatgagaaactcttaactctgggaaatgtacaagggatagtggaaggggaggcaggtggggggatggggtgactgacgggcactgaggagggcacttgacgggatgagcactgggtgttacaatgtatgttggcaaatcaaacttcaataaaaaatatattaaaaaccccaaaaaaaaaaaaaaaaaaaaaaaaaa

SEQ ID NO: 222057 - DNA, 176 bp, Canis familiaris; identical to SEQ ID NO: 11950

SEQ ID NO: 222058 - DNA, 600 bp, Canis familiaris
tgcagatgatacatatacagaaagctacatcagcacaattggtgtggatttcaaaataagaactatagagttagatgggaaaacaatcaagcttcaaatatgggacacagcaggccaagaaagatttcgaacaatcacctccagttattacagaggagcccatggcatcatagttgtgtatgacgtgacagatcaggagtccttcaataatgttaaacagtggctgcaggaaatagaccgttatgccagtgaaaacgtcaacaagttgttggtagggaacaaatgcgatctgaccacaaagaaagtagtagactacacaacagcaaaggaatttgcggattcccttggaattccatttttggaaaccagtgctaagaacgcaacgaatgtagaacagtctttcatgacgatggcagctgagattaaaaagcgaatgggtcctggagcaacagctggtggtgcagagaagtccaatgtgaaaattcagagcactccggtcaagcagtcaggtggaggttgctgctaaaatttgcctccgtctttctctcacagcaaagaatttgcaatctgaacccaagtgaaaaaacaaacttgcctgaa

SEQ ID NO: 222059 - DNA, 600 bp, Canis familiaris
agctcgatggcaagagaattaagctacagatatgggacacagctggtcaagaacggtttcggacgatcacaacagcctattacaggggcgcaatgggcatcatgctggtctatgacatcaccaacgagaaatcctttgacaatatccggaactggattcggaacattgaggagcatgcttctgcagatgtcgaaaagatgatactcggaaacaagtgtgatgtgaacgacaaaagacaagtttccaaggaacggggagaaaagctggccctggactatggaatcaagttcatggagaccagtgcgaaggccaacatcaatgtggagaacgcatttttcactctcgccagagacatcaaagcaaagatggacaaaaaattggaaggcaacagtccccaagggagcaaccagggagtcaaaatcacaccagaccagcagaagaggagcagctttttccgatgtgttcttctgtgaggaacactgccttactctgagcctcgctcagctgagctgactgtgcctgtcctgagtgagccctcctcactcagccggggccctccccctccaatactccctgccgtgccagccactgggcccatgg

SEQ ID NO: 222060 - DNA, 888 bp, Canis familiaris; identical to SEQ ID NO: 11953

SEQ ID NO: 222061 - DNA, 926 bp, Canis familiaris; identical to SEQ ID NO: 11954

SEQ ID NO: 222062 - DNA, 600 bp, Canis familiaris
ttactctgccaatgttatggtagatggaaaaccagtgaatctgggcttatgggatacagctggacaagaagattatgacagattacgtcccttatcctatccgcaaacagatgtattcttaatttgcttttctcttgtgagtcctgcatcatttgaaaatgttcgagcaaagtggtaccctgaagtgcgacaccactgtcccaacacccctatcatcttggtggggactaaacttgatctcagggacgacaaagacacgattgagaaactgaaggagaagaagctgactcccatcacctacccacagggtctggccatggctaaggagatcggtgctgtaaaatacctggagtgctctgctctcacgcagcgaggcctcaagacagtgtttgatgaagctattcgagcggttctctgcccccctcccgtcaagaagaggaagagaaaatgcctgctgttgtaaatgttgggttcccctgccccatccccctcagaacctttgtacgctttgctcaaaaatggtggagccttcgcactcaatgccaagtttttgttacagattagtttttccataaaccatttgaaccaatcagtaatttt

SEQ ID NO: 222063 - DNA, 488 bp, Canis familiaris; identical to SEQ ID NO: 11956

SEQ ID NO: 222064 - DNA, 399 bp, Canis familiaris; identical to SEQ ID NO: 11957

SEQ ID NO: 222065 - DNA, 600 bp, Canis familiaris
attgagattttaaacaggggaccattgaattacttaccactttagaggtcaacgcacccctatcattcttactttcatgtataaaaatattctagtgatttcttgtgtaagttaacattagcatgaacataagtttttatgtactatgtttgttagtagtacatataaattgttatggtaagaattgttttaactttaatgctaattaagaccccatcataaaaagtcaatgtctttaaaaatgaaatgttcttgctatagatatttattttgaaaacatattaaaaagtcattcttttgcctatatctttatgatctgagtttgagaacaaaagagaaaatagtatttggaaacttggtaaattgtaaacagcggagagtgaagttaagcacattaaaaagggcattgaggaccgcaggtgaggagagcttgatgagcatgatgtcattgtccaggatccagctgttatagttgggatggcggatgaccttggcggagttgatgaactgctacaagtcccgcatccaagtgagactcggagagtacaacatcgatgtcctggaggggaatgagcagttcatcaactccgccaaggtcat

SEQ ID NO: 222066 - DNA, 1400 bp, Canis familiaris
gctattgtactgttgtttcatgcatttttttaaagggcatttgagggaaggatgattactatgagtgagaaaaatattttagcttagactaagctacctgccttcaaaatagtttagggaccaccaccatattctattttgttttttatctttgaatgtttttctaatgatttggagagataactatttacaaaaattctacataacagtgataaaatttcttgctctcaccaattttttgtattagcaagatggcctcttccagcaaggtcatttttttaagttatctttcagggtaaaatggaaatactatacagttggaagtcaaactttaatatgttttcagtgttctctaatttttaggaatttttgtagtctttacacctgggaaaaaagatttgtaaattcactataataattgtgtgctttattttataggtaatggttgttaatgttacatccccattttaaaaaacaaccacaacatactattggttacaatgtgtggagagttattgccatatatattgaatcaaaaatatatgaacataaaagtacctgtgaagtaaaatcctttcttgagcattttcaacacttgtaaactgaaaatcagaaaattaaatatttactataaagaagcaaatacgactatagccctttttgatatgtttattaataatgattcttaatggggcttataaggtcgatatgcacagcatcttagaaaaatattgtttaacctgcaaaccctttttaaaaataatgcctacttaatttatatctataaaagaatgtcgggtaattatatttggaacatttacgcactaatcttaaagaaattgaaaattcagttggataaatagtcttacaaaagacagtgctttatgttataactatagctttggtcccatctttaattgagaagcatttatctgtataaaacatatttttggataaatatatatatatatatttgtatctctacagaaaggctctaaaaaacatttgagtaaaacatttggttcccttttctataattatccttaaaaattcttacagctatatttggtttttttgttgtcttcacagtacctatactgctccttttggtgttcacatcttgttctccatttctcacttttgtcaccagctcatgtttgtgccatttttagtataaaagttgcaggcttgttaggtctgcagtttaataagttgccatgctgctagaaagttgtgctttctatttccagctgtttacttcctggaaaaagtagtagctctctgtagcatcatggagtttcagtggaaccaaatttttgccaataaaaactggcattatattgaactatacattgagaaatcaaacaaaataaaatttttactttcaaaaaaaaaaaaaa

SEQ ID NO: 222067 - DNA, 338 bp, Canis familiaris; identical to SEQ ID NO: 11960

SEQ ID NO: 222068 - DNA, 338 bp, Canis familiaris; identical to SEQ ID NO: 11961

SEQ ID NO: 222069 - DNA, 338 bp, Canis familiaris; identical to SEQ ID NO: 11962

SEQ ID NO: 222070 - DNA, 338 bp, Canis familiaris; identical to SEQ ID NO: 11963

SEQ ID NO: 222071 - DNA, 343 bp, Canis familiaris; identical to SEQ ID NO: 11964

SEQ ID NO: 222072 - DNA, 338 bp, Canis familiaris; identical to SEQ ID NO: 11965

SEQ ID NO: 222073 - DNA, 343 bp, Canis familiaris; identical to SEQ ID NO: 11966

SEQ ID NO: 222074 - DNA, 343 bp, Canis familiaris; identical to SEQ ID NO: 11967

SEQ ID NO: 222075 - DNA, 343 bp, Canis familiaris; identical to SEQ ID NO: 11968

SEQ ID NO: 222076 - DNA, 343 bp, Canis familiaris; identical to SEQ ID NO: 11969

SEQ ID NO: 222077 - DNA, 600 bp, Canis familiaris
atgctgtattacacactctgttaatggccagattgtgtttttgtgccaacacaatcccccactttttttgtgatatgtctgctctgctgaagctggcctgctctgacactcaagttaatgagttggtgatatttatcatgggagggctcattctcgtgatcccattcctgctcatcatcacgtcttatgcacggattgtgtcctccatcctcaaggttccttctgccataggcatctgcaaggtcttctccacctgtggctcccacctctcagtggtgtctctcttctatgggacagttattggtctctatttatgcccatcagctaataattctactgttaaggagactatcatggctatgatgtacactgtggtcacccccatgctgaaccccttcatctacagcctgaggaataaagacatgaagggagccctgagaagagtcatttgtagaaagaaaattaccttctctgtgtgatggtaacatttgatacttttacatatttctatctaggagatataataatattggaatactattccagatgttttctcttacccatggaaagcctgtaaaaatggtacggtaaataattatt

SEQ ID NO: 222078 - DNA, 1400 bp, Canis familiaris
ctctacatcgcggagagccgcctgtcttggttagatggctctggattaggattctcactggaataccccaccattagcttgcatgcggtgtccagggacctaaatgcctatccacgagagcatttgtatgttatggtgaatgctaaatttggagaagaatcaaaagaatctgttgctgaagaagaagacagtgatgatgatgttgaacctattgctgaatttagatttgtgcctagtgataaatcagcattggaggcaatgttcactgcaatgtgtgaatgccaggctttgcatcctgatcctgaggatgaagattcagatgattacgatggagaagaatatgatgtggaagcacatgaacaagggcagggggacatccctacattttatacctatgaagaaggattatcccatttaacagcagaaggccaagccaccttggagagattagaaggaatgctttctcagtctgtgagcagccaatataacatggctggagtccggacagaagattcaaccagagattatgaagatgggatggaggtagacactacaccaacagttgctggacagtttgaggatgcagatgttgatcactgaagatgatttatgctgctgtgggattctgctcataactaggaaaggactaaagaacttggtgcctcttctactgtggagtgggtgttgatgaaagtctttttccttctccaaaatttacctgaaccagttctttttttgagacagactatatactgagacaaaaagttgtcaccagcagaagaaactatgacctttattaacaaaggtgaattaacttaaccaagagggtatttgtagtttatcatctacccaaaacttttgtgtataggtatcctctgagtaggcctatagttcctgctttcactatatgcatcttctgtaacctggcaggcctatgtggtgagaatgcgcaggtgcttgaagacataggtagactggatgggaaggaaggaggctgaatctaagatatatcctttagagcctaaggattcccttaccccttagaaagaaagacaaagagatctcagagaaatcctggccactgcttgttcttcacagggattagggtctttttactaatttgggatccaggttaattcatttaggcatctttagagagcctcttggaaatatcctagccacatgaaataccactaatatggatgcttctgattagcttttactctttcaccatgtttcaccagtctgttttgttataacctcttaggttatagcctttaatttctaacctcttaggtcagtttccataacaaatgaaattgggatgaagtcctcacagtacttcaatgatacttgttttgtctttgtaatagtttaacaaataaatctaggttttctat

SEQ ID NO: 222079 - DNA, 600 bp, Canis familiaris
ccttggggtgcctgggtggctcggttaagcatctgccttaggctcaggtcatgatcccagggtcctgggttcgagtcctgcgtcgggctccccgcagagcctgcttctctgtctgcctgtgtctctgcatctctctctgtgtctctcatgaataaataaatagaaatatttaaaaaaatgaatgaatacaatcttaaagaaaaagaaagaaacagtctaacctttaaaaaaatggtgatgtgtttattttacagagacctgggggaaaaaaaacctaaggagcatctcaaaaagtattcttgtgacagacaaagcaaaattcactggctaagcttttcttttctttttcttttttcttttttttttttttggctaagcttttctgagttgattaaaaaaaaaaaaaacagtaagtgaaggtcttactaatcgggttttgagaaaacatattcagtaaaaagatgttcaatggatttggcgaaaagcaagtgtgaggacggagtgccgaagggagaggctgggaaacattggttaggcacctcgggggaaggcgctcatggggaaatttgacttttgactttgtaaactgctgttttgtgg

SEQ ID NO: 222080 - DNA, 600 bp, Canis familiaris
gcgtacggtatcctagctgccaccgaagacgaacctcagaatgataacctctatctcggtgtggtgctgtctgctgttgtcatcatcactggctgcttctcctactaccaagaagcaaagagttcaaagatcatggagtctttcaaaaacatggttccacagcaagcccttgtgattcgaaatggtgaaaagatgagcataaatgctgaagaagttgtagttggagatctagtagaagtaaaaggaggtgaccgaatcccggctgatctccgaatcatttctgcaaatggttgtaaagtagacaattcttctctcactggtgaatctgaacctcaaaccaggtctcctgatttcactaatgaaaacccactggaaacaaggaacattgcctttttttctaccaactgtgttgaaggcactgcccgaggcatagttgtgtacactggggatcggactgtgatgggacggattgctacactcgcatctggactagaaggtggccagactccaattgcagcagaaattgagcatttcatccatcttatcactggtgtggccgtgttcctgggagttaccttctttatcctttctctgattctc

SEQ ID NO: 222081 - DNA, 600 bp, Canis familiaris
agagcctcttcggcctcccggaggcggcgggcgccagggactctcgagacaaccccctgaggaagaagaaggccgcgaacttgaacagcataatccaccgcctggagaaggccgccagccgggaggagcccatcgaatgggagttctgagagggcgcccgccgcgccgggccgggccgggccgagccgcgccgcgccgcgccgggcgggccgagcgggctaagcgggccgagccgggccgagtctgccgagccctgccgagtctgaccgagccgagccgggccgaacctggccgagcgggccgggccgggcagaggggcgggcgcggactccgcggcctggaccgtgttgcgcacttaccgccctgcgggccacagggcaaaatcgcgataggccaaggtgcatatagaaaacaaaggagcattaagcccaatctatgtcgtgttttcaaggaagaaaacggaaatgtgtagtcgagcctttttgtaccctgaagtgttttttttattgccctaagtgatttccacaggttctggaataactcttacagctttgccttgcgccctcctctttcgtgtgggctttaaaaaaaaaaaaaaaa

SEQ ID NO: 222082 - DNA, 1400 bp, Canis familiaris
ctcgatatgatcgcaacgggtgggctgagagaccgcggtcagatggctggagcaatgcctgcaggtgactctagaggatccccgggtaccgagctcgaatttcgtcccaatggactacaggccccaaccccgacacccatctccaccaccactacggtgaccccaaccccaacacccaccggcacacagaccccaaccacgacaccatcaccaccaccaccaggtgacccaacgaaaggaaagactgtatataaaatcataggttctctgagaactacctttaacctcccggcttggttgggttatataactatatgtaaatgcctgatgcaatccaatcgcaagacaaagacggcggaaacgataaatgtgaaaacgctggggtcgctaatgatggacgtaactccaattaattcgtgtcgcgtcactccgccgtttccatcggggaaaccttgtgccgactcgcgattaatgaacccgaccgcggagacgggttcggtgattggcgcagggtgttcttgctgtgtcctaacgacacctactacgcacagggtgattaggtgtactacagcgccaaccccgacacccatctccaccaccactacggtgaccccaacccaacacccaccggcacacagacccaccacgtcacccatcaccaccaccaccacggtgacccaacccgacaccacgcacacagacccaaccacgtacataccaaccaccaggtgtcggattgagaagccagtggaaagatcctccaggtgtgggaagaccatgggatgtggacctactctactgtctgccggggtgggaggggtggggtgccgtgggtgctgtgctctctccgggtgtgtgtcagaggtggcgggtcgtggtactggtcagaatcaaactggtccctgcccgatcattgaggctctagccaagtacaaccagctgctgagattgaagagacttggcagcaaggcgccctttgctggaagaaacttcaggaacccccgtatcaactaaactgcgtggatcagacacccccgttctggttatagcactagtcacctacttagatcacaattactgtattagaaaagatgaggcagctgaaggaaaagaccagttgcaggtcctctccctcctagatgactccttcacctagtgtttccaccagctctgatctgttacttgtacgatctgcttttgacaatccagtgaggttttgtgttaaacatgctccggaacgtgaccgttgacactgggcattaagcaatcccttctctgcctgtctggtctttgatgtttggagctgtttgacttgcaggacagctaatgaggtacctacaaacagatagtactgtttttacatgtgataaataaaaagcatcaaacaacccaaaaaaaaa

SEQ ID NO: 222083 - DNA, 125 bp, Canis familiaris; identical to SEQ ID NO: 11976

SEQ ID NO: 222084 - DNA, 1164 bp, Canis familiaris; identical to SEQ ID NO: 11977

SEQ ID NO: 222085 - DNA, 600 bp, Canis familiaris
atatatactttttaaaaataatttataaatcttaccaaaacttatgctaaatatactttccaggatgaatgcttgagagggtcctgtccgcaggtagagacggagtctagcagttgaggcacgtgaacctgtccgaccgcgcgccccagcggggccgtccgggggacgctgaccacaggacatctagacttgcagattcttactcctatgcctttttttctgtgtaatattaagaactgaatgtgaagtttgtagctagctagctcgggtgtaccttttaagaattttgtaaaccgtttcgtctgtcttttgttactgttctatggtgccaagtactctacataaacaataatatcatgggagaaacaaaactagcctagtccgcttcagatagaacctgcttctaacatgggctgtacataaccctattacgacgagcaaaactgtaagtttcccgggctgcgcaggcagccagcctagtagtagcctcgccgcgacgtctcccctagcacgaaggacagcattaaaaggtcattgcagagcctgtggatgaaacacaacgtatgttttattgatctgcttcagaacactacagaattc

SEQ ID NO: 222086 - DNA, 600 bp, Canis familiaris
cgctacaacctgttcgagcatgaagacacggcccagtttgtccaggtcagagagagcttccctcaccctgaatttaacctgagtctcctgaagaaccatacccgcctcccagaagaggactacagccatgacatcatgctgctgcgcctcgcagagcccgctcagattacggatgctgtgagggtcctggacctgcccacccaggaaccccaagtggggagcacctgctatgcctctggctggggcagcatcgaacccgataagttcatatacccagatgatctccagtgtgtggacctcgaactcctgtccaatgatatatgtgccaatgcccactcccagaaggttacagagttcatgctgtgtgctggacacctggagggcggcaaggatacctgtgtgggtgactcagggggcccactgatctgcgatggtgtgcttcaaggaattacatcctggggccacgtcccatgtggcagtcccaatatgcctgcggtctacaccaaagtgatttcacacctggagtggatcaaggagaccatgacagccaacccctgatcaaccatctgtacctacccccagtaaaatcaaatacgcatc

SEQ ID NO: 222087 - DNA, 600 bp, Canis familiaris
  misc_feature (33)..(33): n is a, c, g, or t
  misc_feature (69)..(69): n is a, c, g, or t
  misc_feature (476)..(476): n is a, c, g, or t
ccctgcttaaacaacacgggtccagcagtcgancgacgctcccgactctcaggagcaacgttcagaganatcagggcccttcagacaggggctccctaggcgagggcctgcccagagcacgcaaggccacgaccaagtttccaggagttccattcagagctcagaagaggcgctacgcgtgcactaggtacatccctttgattgcagcagctgaagaaagtgtttagagaaaaactgtttaaaggtgattgaccctcggcaggaacagctgcgtgaagagctgaggcattgagggccggttcctggtcgtcttaacaaagcaaatgactcccaactgtttctctttgctcttgagtttccagacaggacggccgctcctcagtagtggtttctctcttaagtccacaccaaacgttaagtcactaaagaattgccctctaagaatggtgtgcacggagcagggggacgtgaggatntcttcgggaagctgaggaggggctcgtctaggacgctgcagcgaatccaccggtacaagtgatagtgataaatagatagggccataagattattggccattgatagacttcatgaataggatcc

SEQ ID NO: 222088 - DNA, 600 bp, Canis familiaris
gtgtacgagctggagcgacgcttcaagcaacagaagtacctgtcggcgccggagcgggagcacctggccagcatgatccacctgacgcccacgcaggtcaaaatctggttccagaaccaccgctacaagatgaagcgccaagccaaggacaaggcggcgcagcagcaactgcagcaggacagcggcggcggcggcggcggcgggggcgccgggtgcccgcagcagcagcaggcgcagcagcagtcgccgcgccgcgtggccgtgccggtgctggtgaaagacggcaaaccctgccaggcgggcgcccccgcgccgggggccggcagccttcaaggccacgcgcagcagcaggcgcagcagcaggcgcaggctgcccaggcggccgccgcggctatctcggtgggcagcgggggccccggcctgggggcacacccgggccaccagccgggcagcgcgggccagtctccggacctggcgcaccacgccgccagccccgcggcgctccagggccaggtctccagcctgtcccacctgaactcctcgggctcggactatggcaccatgtcctgctccaccttgctatatggtcggacctggtga

SEQ ID NO: 222089 - DNA, 1400 bp, Canis familiaris
agtgggaacttcgagaagacagccttggccctactggaccgccccagcgagtacgatgcccggcagctgcaaaaggccatgaaaggtctgggcacagatgaggcagtgctcattgagatcttgtgtacgagaaccaataaggagatcatggccattaaggaagcctaccaaaggttatttgacaggagccttgaatcagatgtcaaagctgatacaagtggaaacctaaaagcaattctggtgtccctgctacaggctaatcgtgatgaaggagatgacgtggacaaagatctagctggtcaggatgccaaagatctgtacgatgcaggggatggccgctggggcaccgatgagcttgccttcaatgaagtcctggccaagaggagccacaagcaattacgtgctacctttcaagcttaccaaattctcatcgataaagacatcgaggaggccattgaagcagaaacatcaggagacctgcagaaggcctacttaactctcgtgaggtgtgcccgggaccaggagggctatttcgccgaccgtctgtacaagtccatgaagggcacgggcaccgatgaggagacgctaattcacatcatcgtgaccagggccgaggtggaccttcaggggataaaagcaaagttccaagagaagtatcagaagtccctctcagacatggttcgctcagacacctctggggacttccagaaactgctggtggccctcttgcactgaaccaagccagcatggtggaagcacatggagaagccacctttgtcaagagtccatttcaacccagatttgcaaatgtgaccccagcacaaaaagtattgaagaatcctggcttcctttcttggcagcctgaatgctgtggccaggccaagctgtttagaagggcagcagcctcaaaacgcttgggcagatcaccctgaatgctggcttagcaggtccctgagcagcctctctgcttgcctctagcatggcaaactgaatgctttctgaacacaaatgagattagctgttgatgaaagaaactgcacttgtaataaaacattcagaagaataggtatcgcacagagtgggtagagactgaatggttaaggtacagggaagacaaaattaatcagttgatcaattttccttctgtgggggggtctgggtggctcagtcggttaagggtctgccttgagctcaagtcatgatcttggggtcctgggaccaagccccatgtcgggctccctgctcagcagggaatctgcttctctctccctctgccccttctctccactcgcactccacttgtgtgtgtgtgtgtgtgcgtgcacgcacatgctctctctctctctctccaaaataaataaataaataaaatcttcaataaatttaaaaaaaaaaaaaaa

SEQ ID NO: 222090 - DNA, 1400 bp, Canis familiaris
agtgacctgagtgggaacttcgagaagacagccttggccctactggaccgccccagcgagtacgatgcccggcagctgcaaaaggccatgaaaggtctgggcacagatgaggcagtgctcattgagatcttgtgtacgagaaccaataaggagatcatggccattaaggaagcctaccaaaggttatttgacaggagccttgaatcagatgtcaaagctgatacaagtggaaacctaaaagcaattctggtgtccctgctacaggctaatcgtgatgaaggagatgacgtggacaaagatctagctggtcaggatgccaaagatctgtacgatgcaggggatggccgctggggcaccgatgagcttgccttcaatgaagtcctggccaagaggagccacaagcaattacgtgctacctttcaagcttaccaaattctcatcgataaagacatcgaggaggccattgaagcagaaacatcaggagacctgcagaaggcctacttaactctcgtgaggtgtgcccgggaccaggagggctatttcgccgaccgtctgtacaagtccatgaagggcacgggcaccgatgaggagacgctaattcacatcatcgtgaccagggccgaggtggaccttcaggggataaaagcaaagttccaagagaagtatcagaagtccctctcagacatggttcgctcagacacctctggggacttccagaaactgctggtggccctcttgcactgaaccaagccagcatggtggaagcacatggagaagccacctttgtcaagagtccatttcaacccagatttgcaaatgtgaccccagcacaaaaagtattgaagaatcctggcttcctttcttggcagcctgaatgctgtggccaggccaagctgtttagaagggcagcagcctcaaaacgcttgggcagatcaccctgaatgctggcttagcaggtccctgagcagcctctctgcttgcctctagcatggcaaactgaatgctttctgaacacaaatgagattagctgttgatgaaagaaactgcacttgtaataaaacattcagaagaataggtatcgcacagagtgggtagagactgaatggttaaggtacagggaagacaaaattaatcagttgatcaattttccttctgtgggggggtctgggtggctcagtcggttaagggtctgccttgagctcaagtcatgatcttggggtcctgggaccaagccccatgtcgggctccctgctcagcagggaatctgcttctctctccctctgccccttctctccactcgcactccacttgtgtgtgtgtgtgtgtgcgtgcacgcacatgctctctctctctctctccaaaataaataaataaataaaatcttcaaaaaaaaaaaaaaa

SEQ ID NO: 222091 - DNA, 600 bp, Canis familiaris
ggcctctacccgctgcccctgctcaacagcgccgccctggacgacggcaaggccaccctgaccccttccaatacacccctggggcgcaacctctcgactcaccagacctaccccgtggtggcagatcctcattcacccttcgccataaagcaggaaacccccgaggtgtccagttctagctccaccccttcctctttatctagctccgcctttttggatctgcagcaagtcggcggcgccggggtcccagccggtgcctcggtcccgcccttcaatgcctttccccatgctgcctccgtgtacgggcagttcacgggccaggccctcctctcagggagagagatggtgggacccacactgcccggatacccaccccacatccccaccagtggacagggcagctatgcctcttctgccatcgcaggcatggtggcaggaagcgaatactctggcaatgcctacggccacaccccctactcctcctacggcgaggcctggcgtttccccaactccagcttgctgagttccccatattattacagttccacatcaaggccaagtgcgccacccaccaccgccacggcctttgaccatctgtag

SEQ ID NO: 222092 - DNA, 600 bp, Canis familiaris
agcagcagcagcgggccccgcaagcaccttcgcacggacgccttcagccaacaccaccttgagccactcgagtgcccattcgagcggcagcactacccggaggcctatgcctcccccagccacaccaaaggcgagcagggcctctacccgctgcccctgctcaacagcgccgccctggacgacggcaaggccaccctgaccccttccaatacacccctggggcgcaacctctcgactcaccagacctaccccgtggtggcagctccgcctttttggatctgcagcaagtcggcggcgccggggtcccagccggtgcctcggtcccgcccttcaatgcctttccccatgctgcctccgtgtacgggcagttcacgggccaggccctcctctcagggagagagatggtgggacccacactgcccggatacccaccccacatccccaccagtggacagggcagctatgcctcttctgccatcgcaggcatggtggcaggttccccatattattacagttccacatcaaggccaagtgcgccacccaccaccgccacggcctttgaccatctgtagttgctatggggacagtgggagcaactga

SEQ ID NO: 222093 - DNA, 270 bp, Canis familiaris; identical to SEQ ID NO: 11986

SEQ ID NO: 222094 - DNA, 198 bp, Canis familiaris; identical to SEQ ID NO: 11987

SEQ ID NO: 222095 - DNA, 150 bp, Canis familiaris; identical to SEQ ID NO: 11988

SEQ ID NO: 222096 - DNA, 315 bp, Canis familiaris; identical to SEQ ID NO: 11989

SEQ ID NO: 222097 - DNA, 261 bp, Canis familiaris; identical to SEQ ID NO: 11990

SEQ ID NO: 222098 - DNA, 213 bp, Canis familiaris; identical to SEQ ID NO: 11991
  misc_feature (47)..(47): n is a, c, g, or t

SEQ ID NO: 222099 - DNA, 210 bp, Canis familiaris; identical to SEQ ID NO: 11992

SEQ ID NO: 222100 - DNA, 316 bp, Canis familiaris; identical to SEQ ID NO: 11993

SEQ ID NO: 222101 - DNA, 259 bp, Canis familiaris; identical to SEQ ID NO: 11994

SEQ ID NO: 222102 - DNA, 372 bp, Canis familiaris; identical to SEQ ID NO: 11995

SEQ ID NO: 222103 - DNA, 415 bp, Canis familiaris; identical to SEQ ID NO: 11996
  misc_feature (20)..(20): n is a, c, g, or t

SEQ ID NO: 222104 - DNA, 562 bp, Canis familiaris; identical to SEQ ID NO: 11997
  misc_feature (86)..(86): n is a, c, g, or t
  misc_feature (176)..(176): n is a, c, g, or t
  misc_feature (228)..(228): n is a, c, g, or t
  misc_feature (266)..(266): n is a, c, g, or t
  misc_feature (302)..(302): n is a, c, g, or t
  misc_feature (311)..(311): n is a, c, g, or t
  misc_feature (321)..(321): n is a, c, g, or t
  misc_feature (469)..(469): n is a, c, g, or t

SEQ ID NO: 222105 - DNA, 262 bp, Canis familiaris; identical to SEQ ID NO: 11998
  misc_feature (14)..(14): n is a, c, g, or t
  misc_feature (16)..(16): n is a, c, g, or t

SEQ ID NO: 222106 - DNA, 365 bp, Canis familiaris; identical to SEQ ID NO: 11999
  misc_feature (230)..(230): n is a, c, g, or t
  misc_feature (273)..(273): n is a, c, g, or t
  misc_feature (311)..(311): n is a, c, g, or t

SEQ ID NO: 222107 - DNA, 343 bp, Canis familiaris; identical to SEQ ID NO: 12000

SEQ ID NO: 222108 - DNA, 221 bp, Canis familiaris; identical to SEQ ID NO: 12001
  misc_feature (175)..(175): n is a, c, g, or t
  misc_feature (178)..(178): n is a, c, g, or t

SEQ ID NO: 222109 - DNA, 176 bp, Canis familiaris; identical to SEQ ID NO: 12002
  misc_feature (4)..(4): n is a, c, g, or t
  misc_feature (20)..(20): n is a, c, g, or t
  misc_feature (24)..(24): n is a, c, g, or t
  misc_feature (26)..(26): n is a, c, g, or t
  misc_feature (140)..(140): n is a, c, g, or t

SEQ ID NO: 222110 - DNA, 220 bp, Canis familiaris; identical to SEQ ID NO: 12003
  misc_feature (16)..(16): n is a, c, g, or t
  misc_feature (55)..(55): n is a, c, g, or t

SEQ ID NO: 222111 - DNA, 285 bp, Canis familiaris; identical to SEQ ID NO: 12004
  misc_feature (232)..(232): n is a, c, g, or t
  misc_feature (268)..(268): n is a, c, g, or t

SEQ ID NO: 222112 - DNA, 335 bp, Canis familiaris; identical to SEQ ID NO: 12005

SEQ ID NO: 222113 - DNA, 455 bp, Canis familiaris; identical to SEQ ID NO: 12006

SEQ ID NO: 222114 - DNA, 141 bp, Canis familiaris; identical to SEQ ID NO: 12007

SEQ ID NO: 222115 - DNA, 474 bp, Canis familiaris; identical to SEQ ID NO: 12008

SEQ ID NO: 222116 - DNA, 116 bp, Canis familiaris; identical to SEQ ID NO: 12009

SEQ ID NO: 222117 - DNA, 185 bp, Canis familiaris; identical to SEQ ID NO: 12010

SEQ ID NO: 222118 - DNA, 157 bp, Canis familiaris; identical to SEQ ID NO: 12011

SEQ ID NO: 222119 - DNA, 147 bp, Canis familiaris; identical to SEQ ID NO: 12012

SEQ ID NO: 222120 - DNA, 477 bp, Canis familiaris; identical to SEQ ID NO: 12013
  misc_feature (106)..(106): n is a, c, g, or t
  misc_feature (110)..(110): n is a, c, g, or t
  misc_feature (132)..(132): n is a, c, g, or t
  misc_feature (136)..(136): n is a, c, g, or t

SEQ ID NO: 222121 - DNA, 246 bp, Canis familiaris; identical to SEQ ID NO: 12014

SEQ ID NO: 222122 - DNA, 265 bp, Canis familiaris; identical to SEQ ID NO: 12015
  misc_feature (7)..(7): n is a, c, g, or t
  misc_feature (9)..(9): n is a, c, g, or t

SEQ ID NO: 222123 - DNA, 412 bp, Canis familiaris; identical to SEQ ID NO: 12016
  misc_feature (32)..(32): n is a, c, g, or t
  misc_feature (54)..(54): n is a, c, g, or t
  misc_feature (94)..(94): n is a, c, g, or t
  misc_feature (112)..(112): n is a, c, g, or t
  misc_feature (118)..(118): n is a, c, g, or t
  misc_feature (181)..(181): n is a, c, g, or t
  misc_feature (294)..(294): n is a, c, g, or t

SEQ ID NO: 222124 - DNA, 552 bp, Canis familiaris; identical to SEQ ID NO: 12017
  misc_feature (3)..(3): n is a, c, g, or t

SEQ ID NO: 222125 - DNA, 307 bp, Canis familiaris; identical to SEQ ID NO: 12018

SEQ ID NO: 222126 - DNA, 424 bp, Canis familiaris; identical to SEQ ID NO: 12019
  misc_feature (25)..(25): n is a, c, g, or t

SEQ ID NO: 222127 - DNA, 472 bp, Canis familiaris; identical to SEQ ID NO: 12020

SEQ ID NO: 222128 - DNA, 472 bp, Canis familiaris; identical to SEQ ID NO: 12021

SEQ ID NO: 222129 - DNA, 472 bp, Canis familiaris; identical to SEQ ID NO: 12022

SEQ ID NO: 222130 - DNA, 472 bp, Canis familiaris; identical to SEQ ID NO: 12023

SEQ ID NO: 222131 - DNA, 472 bp, Canis familiaris; identical to SEQ ID NO: 12024

SEQ ID NO: 222132 - DNA, 472 bp, Canis familiaris; identical to SEQ ID NO: 12025

SEQ ID NO: 222133 - DNA, 600 bp, Canis familiaris
cagaactgttcctgtcaccatggaggatactacaactgtcaagataaatacaagccagagagcttgccagaccttaagtgggaaatgtgtacctccatagacaaggtctcctggggctatcgtcgtaacatggtgatgtcggacgttgcaagtgaatgtgaaatcatctcggaactggttcagacagtgagcttgggaggcaactacctcctcaacattggaccaactaaagatggactgattgtccccatcttccaagaaaggcttctttccattgggaagtggctaagcatcaatggggaggctatctatgcctctaaaccgtggagggtacaactggaaaagaacacgacttctgtgtggtatacctcaagaggaatgactgtttatgccattttcctgcgctggccagaaaatggagtcttaagccttaaatccccagtaactacctcgactacacagataacgatgctggggatccagaaagatctgaagtggtccacggaaccagaaggtctcctcatttatctgccccagttatcactctttactctgccagttgagtttggttggactataaagctgacaggagtggaatga

SEQ ID NO: 222134 - DNA, 360 bp, Canis familiaris; identical to SEQ ID NO: 12027

SEQ ID NO: 222135 - DNA, 217 bp, Canis familiaris; identical to SEQ ID NO: 12028
  misc_feature (29)..(29): n is a, c, g, or t

SEQ ID NO: 222136 - DNA, 600 bp, Canis familiaris
tgtcatgccaaacggctgttggatgagctccagctgaggcaccactgctgtgggcggcacggatacaaggattggtttggggtccagtgggtcagcagccgttacttggatcccagtgaccaggacgtggttgatcggatccagagcaacgtggaaggcctgtatctgatcgatggtgtccctttttcctgctgcaacccccactcgcccagaccttgcctgcaaagccggctctcagacccccacgcacaccctctctttgatcctcgtcagcccaacctaaacctctggacacaaggatgccacgcagcactgctggggcacctgcagagcttggcgagcacactgggcagcacgctgactgtcaccttcatgttgcagattctggtgctcctgggcctgcggtacctccagacggcactggaggggcttggaggagtcatcgatggggagggagaggcccagggctatctctttcccagtgggctgaaagacatgctgaaaacagcatggctacaggcgggggttgctcacaggccagcacctgaggaggccccagcagaagaggcacctcctaaggagggtctacctgaggcctag

SEQ ID NO: 222137 - DNA, 530 bp, Canis familiaris; identical to SEQ ID NO: 12030
  misc_feature (18)..(18): n is a, c, g, or t
  misc_feature (54)..(54): n is a, c, g, or t
  misc_feature (336)..(336): n is a, c, g, or t
  misc_feature (389)..(389): n is a, c, g, or t
  misc_feature (407)..(407): n is a, c, g, or t
  misc_feature (438)..(439): n is a, c, g, or t
  misc_feature (472)..(472): n is a, c, g, or t
  misc_feature (483)..(483): n is a, c, g, or t
  misc_feature (491)..(491): n is a, c, g, or t
  misc_feature (501)..(501): n is a, c, g, or t
  misc_feature (515)..(516): n is a, c, g, or t
  misc_feature (522)..(522): n is a, c, g, or t

SEQ ID NO: 222138 - DNA, 344 bp, Canis familiaris; identical to SEQ ID NO: 12031
  misc_feature (7)..(7): n is a, c, g, or t
  misc_feature (33)..(33): n is a, c, g, or t
  misc_feature (75)..(75): n is a, c, g, or t
  misc_feature (133)..(133): n is a, c, g, or t
  misc_feature (140)..(140): n is a, c, g, or t
  misc_feature (143)..(143): n is a, c, g, or t
  misc_feature (150)..(150): n is a, c, g, or t
  misc_feature (166)..(166): n is a, c, g, or t
  misc_feature (207)..(207): n is a, c, g, or t
  misc_feature (253)..(253): n is a, c, g, or t
  misc_feature (279)..(279): n is a, c, g, or t
  misc_feature (283)..(283): n is a, c, g, or t
  misc_feature (289)..(289): n is a, c, g, or t
  misc_feature (294)..(294): n is a, c, g, or t
  misc_feature (299)..(299): n is a, c, g, or t
  misc_feature (301)..(301): n is a, c, g, or t
  misc_feature (319)..(319): n is a, c, g, or t
  misc_feature (335)..(335): n is a, c, g, or t

SEQ ID NO: 222139 - DNA, 235 bp, Canis familiaris; identical to SEQ ID NO: 12032
  misc_feature (69)..(70): n is a, c, g, or t

SEQ ID NO: 222140 - DNA, 300 bp, Canis familiaris; identical to SEQ ID NO: 12033
  misc_feature (82)..(82): n is a, c, g, or t
  misc_feature (207)..(207): n is a, c, g, or t
  misc_feature (225)..(225): n is a, c, g, or t
  misc_feature (232)..(232): n is a, c, g, or t
  misc_feature (257)..(258): n is a, c, g, or t
  misc_feature (271)..(271): n is a, c, g, or t

SEQ ID NO: 222141 - DNA, 495 bp, Canis familiaris; identical to SEQ ID NO: 12034
  misc_feature (79)..(79): n is a, c, g, or t
  misc_feature (175)..(175): n is a, c, g, or t
  misc_feature (281)..(281): n is a, c, g, or t
  misc_feature (292)..(292): n is a, c, g, or t
  misc_feature (296)..(296): n is a, c, g, or t
  misc_feature (303)..(303): n is a, c, g, or t
  misc_feature (307)..(307): n is a, c, g, or t
  misc_feature (309)..(309): n is a, c, g, or t
  misc_feature (355)..(355): n is a, c, g, or t
  misc_feature (376)..(376): n is a, c, g, or t
  misc_feature (386)..(386): n is a, c, g, or t
  misc_feature (397)..(397): n is a, c, g, or t
  misc_feature (446)..(446): n is a, c, g, or t
  misc_feature (449)..(449): n is a, c, g, or t
  misc_feature (476)..(477): n is a, c, g, or t
  misc_feature (479)..(479): n is a, c, g, or t
  misc_feature (484)..(484): n is a, c, g, or t
  misc_feature (486)..(486): n is a, c, g, or t

SEQ ID NO: 222142 - DNA, 573 bp, Canis familiaris; identical to SEQ ID NO: 12035

SEQ ID NO: 222143 - DNA, 1400 bp, Canis familiaris
accccagggttgaaagaagctaccagggacacataacatggcagccagcgggaagaccagcaagtctgcatcaaaccatgtgatcttcaagaagatttcccgggacaagtcggtgaccatctacttggggaagagagactatatagaccatgttgaacaagtagagcctgtggatggtatcgtgttggtggatcccgagcttgtgaagggaaagaaagtgtatgtctctctgacctgcgccttccgctacggccaggaagacatcgacgtgattggcctgagcttccgcagggacctatacttctctcaggtccaggtgttcccacccgtagaggctgcaggcgcccccacgaagctgcaggagagcctgatgaagaagctggggggcaacacgtaccccttcctgctcacgttccctgattacttaccctgctcggtgatgctgcagccagctccgcaagacatggggaagtgctgtggggtcgactttgaggtcaaggcattcgccagagacagcacagaggatgaagaggacaaagtgcccaagaagagctccgtgcgtttactgatccggaaagtacagcatgcgccatcgaagatgggtccccagccccgagctgaggccgcctggcagttcttcatgtccgacaagcccttgcacctggctgtctccctcagcaaagagatctatttccatggggagcccattactgtgactgtgactgtgaccaataacacagagaagactgtgaagaagattaaagcattagtggaacaagtggccaacgtggttctctactcgagtgattattataccaagccagtggcccaggaggaaacacaagaaaaagtgccaccgaacagcactctgaccacgacgctgacgctggtgcccttgctggccaacaaccgtgaaagaaggggcatcgccctggatgggaagattaagcatgaggacacgaaccttgcttcgagcaccataataaaggagggcatagaccggactgtcctgggcatcctggtgtcttaccatatcaaggtgaagctcacggtgtcaggctttctgggagagctcacctccagtgaagtggcaactgaggtgcctttccgcctcatgcacccccagcccgaggacccagctacggcaaaggaaagttttcaggatgcaaatttggttttcgaggagtttgctcgccaaaatctgaaagactttgctgaggaggggaagaaagaccgggaggccatggatgagtgaagaggtcggtcgacctggacgctgggaaacagtagttcacgcaggataagccaaacgctacagttagccctttagttaggctaaataccaaagtgtgagtcttcttcatagaaataaagtttgtctgttcagctgtgaaaaaaaa

SEQ ID NO: 222144 - DNA, 600 bp, Canis familiaris
aagaagctgagggaggaggaggcggccagactgttctatcagattgcatcggccgtggcccactgccacgacggggggctggtgctacgggacctgaagctgcggaagttcatctttaaggacgaagaaaggactcgggtcaagctggaaagcctggaagatgcctacatcctgcggggggatgacgactccctctccgacaagcacggctgccccgcttacgtaagccctgagatcttgaacaccagtggcagctactcgggcaaagcagccgacgtgtggagcctgggcgtgatgctctacaccatgttggtggggcggtaccctttccatgacattgagcccagttccctcttcagcaagatccggcgtggccagttcaacattccagagactctgtcacccaaggccaagtgcctcatccgaagcatcctgcggcgggagccctcagagaggctgacctcgcaggaaattctggaccatccttggttttctacagattttagcgtctcgaattcaggatatggtgctaaggaagtgtctgatcagctggtgccggatgtcaacatggaagagaacttggaccctttctttaactga

SEQ ID NO: 222145 - DNA, 1400 bp, Canis familiaris
acagagaaagaactaaaagaacagttatcggagcagatgcaaaaatatcacgtcagggaagaagaggccaagaagtacaagcaagagaatgacaagttgaagaaggagattttcactcttcagaaggatttaaaagataagaatgttctcatcgagaactctcatgacatggaaagagcactcaacagaaaagcagaagagctcaacaaacagttgaaagacctgttgcagaagtacagtgagataaagactgagaaggagaagctggttgacgacaatgccagacagacttctgagcttcttgcagcccagacccttctgcaaaagcaacatgttccattggaacaagttgagaccctgaaaaaatctcttaacagcacaattgagcatctcaaggaagaactgaagaataagcaaaagtgttatgagaaagagcagcagacagtggccaaactgcatcagatgctagagaaccaaaagaactcttcagtgcccctgggagagcatctgcgggttaaggaagcctttgagaaggaagtgggcatgataaaggccagcctgagggaaaaggaagaagaaagccaaaacaaaaccgaagaggtctccaaactgcagtctgaggttcaggacacaaaacaagcattacaaaaactagagacaagagaggtagttgatttgtctaaatataaagcaacaaaaagtgatctggagacccagatttccaacctgaatgaaaaactggccaatctgaatcggaagtatgaagaagcctgcgaggaggtgctgcgtgcccaaaggaagcaactgtctgccaaagatgagaaggaattgctacatttcagcattgagcaagaaatcaaggatcagcaggagcggtgtgataagtccttaacaacaatcacagagttacagaaaagaatacaggaatctgccaaacagatcgaagcgaaagataataagataacagaactgcttaatgatgtggaaagactcaaacaggcactcagtggcctttcacagctcacttccccgagcgggagtcccagcaagaggcagagccagctgattgacaccctgcagcaccaagtgaagtctctacagcagcagctggctgacactgacagacagcaccaagaggtgattgcgatttatcggacacaccttctgagtgctgcacagggtcacatggatgaagatgtgcaggcggccttactccagatcatacagatgaggcaggggctcgtgtgctagcaggcagtgctgactggctggtgtgtgctttggctgatggtgccaagcattccccttgcaactccatggcctttctgggccttgtgctagtataattgaaataaaatatattttgtttcatcaaaaaaaaaaaaaaaaaaaaaaaaaaa

SEQ ID NO: 222146 - DNA, 504 bp, Canis familiaris; identical to SEQ ID NO: 12039

SEQ ID NO: 222147 - DNA, 600 bp, Canis familiaris
gccacaacctgtcggagtcggaagatgaaggccagttagtccaagtcagaaaaagcttcatacatccactctacaaaacgaaggtccctagagccgtcatccgtccaggggaagatagaagccatgacctcatgctgctgcacctggaagagcccgccaagataacaaaagctgtgagggtgatggacctgcccaaaaaggaacctccattggggagtacctgctatgtctctggatggggcagcactgatccagaaacgatttttcacccagggagtctccagtgtgtggacctcaaactcctgtccaataatcaatgtgcaaaagtatacactcaaaaggtgacaaagttcatgctgtgtgctggtgtcttggagggtaaaaaagatacctgcaaaggtgactcaggaggccctctgatatgtgatggtgaattggtaggtatcacatcatggggggctactccatgtggcaagcctcaaatgccatccttgtataccagggtgatgcctcatctgatgtggatcaaggacaccatgaaagccaacacctgaatgtccctttcctactctctactcctagtaaaattgagtatacatc

SEQ ID NO: 222148 - DNA, 157 bp, Canis familiaris; identical to SEQ ID NO: 12041

SEQ ID NO: 222149 - DNA, 600 bp, Canis familiaris
acctgggtcatggcactggcctgtgcagcaccccccctcgctggctggtccagtctcctgtctcactcccctctggtgctcaggtacatcccagagggcatgcagtgctcatgtgggatcgactactacacactcaagccagaaatcaacaatgagtccttcgtcatctacatgttcgtggtccacttcgccatccccatgattgtcatattcttctgctatggacagctcgtcttcacagtcaaggaggcagctgcccagcagcaggaatcggccaccacccagaaggctgaaaaggaggtcacccgcatggtcatcatcatggtcatcgctttcctgatctgctgggtgccctatgccagtgtggcattctacatcttcacccaccagggctccgactttggccccatcttcatgaccctcccagcgttcttcgccaagtcctcctccatctacaaccctgtcatctatatcatgatgaacaagcagttccggaactgcatgatcaccaccctctgctgtggcaagaacccactgggtgacgacgaggcctctgccagcgcctccaagacggagaccagccaggtggcaccggcctaa

SEQ ID NO: 222150 - DNA, 328 bp, Canis familiaris; identical to SEQ ID NO: 12043

SEQ ID NO: 222151 - DNA, 162 bp, Canis familiaris; identical to SEQ ID NO: 12044

SEQ ID NO: 222152 - DNA, 295 bp, Canis familiaris; identical to SEQ ID NO: 12045

SEQ ID NO: 222153 - DNA, 370 bp, Canis familiaris; identical to SEQ ID NO: 12046

SEQ ID NO: 222154 - DNA, 600 bp, Canis familiaris
caggatgctggaaactatgtctgtgaaactgctctgcaagaggtcgaaggcctaaagaaaagagagtcattgacactcatagtagaaggaaaacctcaaatcaaaatgacaaagaaaactgatcccagtggactgtctaaaacaataatctgccatgtggaaggttttccgaagccggctatacaatggacaattaccggcagtggaagcgtcataaaccaaacagaggaatctccttatataaatggcaggtattatagtacaattatcaattcccctgaagagaatgttacattaacttgcacagcagaaaaccagctggagagaacagtaaactccttgaatgtctctgctataagtattccagaacacgatgaggcagacgaaataagtgatgaaaacagagaacaggtgaaccaccgggcaaccctgatcgtggggatcgtccttcgtctcctccatggtgccctagttgctggtgttgtctactggctgtacgtgaagaaatcaaagactgcatcaaaacacgtaaacaaggaccttggtaatctggaagaaaacaaaaagttagaacaaaacaatcacaggacagaagcctaa

SEQ ID NO: 222155 - DNA, 1400 bp, Canis familiaris
gggaggaaaaattcagagaatataggccggagacctgttgcatttttgcaacacggtttgctcgcatcagccacaaactggatctccaacctgcccaacaacagcctggccttcatcctggccgacgccgggtacgacgtgtggctggggaacagcaggggcaacacctgggccaggaggaatctgtactactcgcccgactccgtcgaattctgggctttcagctttgacgagatggctaaatatgaccttcccgccaccattgacttcatcttgaagaaaacgggacaggacaagctacactacgttggccattcccagggcaccaccattggtttcatcgccttttccaccaatcccaagctggcgaaacggatcaaaaccttctatgcattagctcccgttgccaccgtgaagtacaccgaaaccctgttaaacaaactcatgctcgtcccttcgttcctcttcaagcttatatttggaaacaaaatattctacccacaccacttctttgatcaatttctcgccaccgaggtatgctcccgcgagacggtggatctcctctgcagcaacgccctgtttatcatttgtggatttgacactatgaacttgaacatgagtcgcttggatgtgtatctgtcacataatccagcaggaacatcggttcagaacgtgctccactggtcccaggctgttaagtctgggaagttccaagcttttgactggggaagcccagttcagaacatgatgcactatcatcagagcatgcctccctactacaacctgacagacatgcatgtgccaatcgcagtgtggaacggtggcaacgacttgctggccgaccctcacgatgttgaccttttgctttccaagctccccaatctcatttaccacaggaagattcctccttacaatcacttggactttatctgggccatggatgcccctcaagcggtttacaatgaaattgtttccatgatgggaacagataataagtagttctagatttaaggaattattcttttattgttccaaaatacgttcttctctcacacgtggttttctatcatgtttgagacacggtgattgttcccatggttttgatttcagaaatgtgttagcatcaacaatctttccattggtaatttttgaatttaaaatgatttttaaatttggggcatctgggtggctcagtcggctaagtcgtctgccttcggcttaagtcatgatctcggggtcctaggatggagccttgtgtctgggctccctgcccggggcgggggtctgcttctcctcctgctgctcccccctgctcgtgcgtgcacacgcgctctctctctctctctctcaaataaataaataaataaataaatacttaataaaataaaaaaaaaaaaaaa

SEQ ID NO: 222156 - DNA, 600 bp, Canis familiaris
tccaaaactctgctaaccagaacatcccctgcttaactgggtatcgctgagcatcccctctacttagatctttccagcacgcattaacaatccctgcctgcccccaccctgcccgtccagctgaagtttcttttgtggaactgatgttccagagcctgagccttggcacggctgactcggggtgcccttccccatggcttcagaccctggaaagttagccgcaaccaactagagggctgcttgaggtagtgagcgtccagtctctggaggtctccaagcagaaccggcaacatcgttggccagggatggagcagtccgagacaggttctaggtgtaaagatgaacctgatcctcggcaggtggagcgtggttgggagccagtagcagcgacctcacctgggagcttgttagacatgcagagtctcaggccctgacctgactcgaatcagaatctgcattttaacgagtccactccaagcgctcacctgcactcgaacatttgtgaatcgtgtcactaagtgatcctgagaatctctaagatttcattaaaaaccaggctagactctagccctgagactccttttaaaaaaaaaaaaaaaa

SEQ ID NO: 222157 - DNA, 566 bp, Canis familiaris; identical to SEQ ID NO: 12050

SEQ ID NO: 222158 - DNA, 561 bp, Canis familiaris; identical to SEQ ID NO: 12051

SEQ ID NO: 222159 - DNA, 1400 bp, Canis familiaris
actccagctggcaacggcagcagggagctgctggacacccgggacccgctgcttgtccaggccgagctagccctgctctccacggtcttcgtggctgtggccctgagcaacggcctggtgctgggggccctggcgcgccgggtccggcggggtcgctgggcacccatgcacgtcttcattggccacttgtgcctggccgacctggctgtggctctgttccaagtactgccccagctggcgtgggatgccacggaccgcttccgtgggcctgatgccctgtgccgggcagtcaagtacctgcagatggtgggcatgtatgcctcctcctacatgatcctggccatgacgctggaccgccaccgcgccatctgccgccccatgctggcataccgccacggaggtggagctcgctggaaccggccggtgctggtggcctgggccttctcgctcattctcagcctgccccagctcttcatctttgcccagcgtgacgtgggaaatggcagtggggtccttgactgctgggcccacttcgctgagccctggggcctccgagcctatgtcacctggatcgccctaatggtctttgtggcacctgccctgggcatcgcggcctgccaggtgctcatcttccgggagattcactccagcctggtgccggggccagcagagagggctggggggtgccgtggagggcaccggaccggcagccccagcgagggggcccgggtgtccgcagccatggccaagacggtgaggatgacgctggtcattgtgatcgtctacgtgttgtgctgggcgcccttcttcctcgtgcagctgtgggcagcgtgggacccgcaggcgcccctggaaggggcccccttcgtgctgcttatgttgctggccagcctcaacagctgcaccaacccctggatctacgccttcttcagcagcagcgtctcctccgagctgcgcagcctgttctgctgggcccggagtcgggccccacccagcctggggccccaagaggagtcctgcgccacggccagctccttcctggccaaggacacttcctcctgaggagccaaggggcgccttccttccagaggctctgcgaggcccggctgcctacctggggctggccctcggacccctggggggaggagaccctctgggagggggctctgggactaggagccagaggtcagctccttggggcctagcgtgggggggctagggcggcagccgggggcctcgtctggggggcgcacaaggcctccacgcagcgggtgcctgcccctgacaggaggctcctcggagcccgggaggaaggaaaggggtagggggcctctctgctccccctctgccctcccctctcactctgtccctaataaaagatccagcactttttccataaa

SEQ ID NO: 222160 - DNA, 600 bp, Canis familiaris
acctcatccagatgaccatccaaagggagttctcccactgcacgactatcaccattgctcacaggctacacaccatcatggacagtgacaagtgagtgtgggggacagcttgacagatgggaccaagcccttgaacaacagtaataacactggccgtaggatatctacagctaaaggttgaaccaccttcattttactgatgaggaaaccgagaattcaagtaatttgtccaaaattaaacatgaagttaatgaaagccaactcagttaagggaactggacttgagggtaaaatgggcaattgtgtgtttacttattaactgagtttggggaggtggcggcccgagctatgagaggctgatattaaccagagatcttctcaactactcaacagctcaacagctgttctcaacagctgttcccaagcaagaagctttctggcttctgactagaagctttctacttcttccaactctgacatattacattaaaaatgggggtaacaccagtaatcttggaagctgtttggagagaataggctcccttaaacaatatatatttgtaaaaaaaaacttctgtaattggactgactcatactgca

SEQ ID NO: 222161 - DNA, 600 bp, Canis familiaris
tttgccctctgctggtttcccctcaactgctatgtcctcctcctgtccagcaaggtcatccacaccaacaatgccctctacttcgccttccactggtttgccatgagcagcacttgctacaaccctttcatctactgctggctcaacgagaatttcaggattgagctgaaggcattactgagcatgtgccaaagactcccaaagccccaggaagaaaggcccccgtctccagtgccttccttcagggtggcttggacagagaagagcaatgggcggagggttcccccagccaacaacctcctgctttcctcccatctccactctgggaagacagacctgtcttctgtggagcccattgtagccatgagttaggtgggagtgggggtgggaagaggcaggaggagagctctgtctccaggacctgaggacagagcctgcaagaaagcctgttctctgacacatgacctttacagggctgaaaacaaggtcctgcagaagccacaggacccttgatttcctaggaaacgctatctagctttctaccccatttgatgtgaaaactacaagacagctaccaattagacacgtgtttatgaattc

SEQ ID NO: 222162 - DNA, 600 bp, Canis familiaris
agcctgatggagcgcttcaccgacgacaccttctgcgaggcctgcaagtccaccgtgggtgttgactttaaaatcaagactgtagagctaagaggaaagaaaatcagattacagatctgggacacagcaggtcaggagagattcaacagcattacctcagcttattacagaagtgccaaggggatcatactagtatatgatatcactaagaaggagacttttgatgatttgccaaaatggatgaagatgattgataagtacgcttcagaagatgcagaacttctcttagttggaaataagttggactgtgaaactgaccgagagatcaccaggcagcaaggtgaaaagttcgcgcacgagataaccgggatgcggttctgtgaagccagtgccaaggataacttcaatgtggacgagatctttctgaagcttgtcgatgacattctgaaaaagatgcctctggatattttaaggaatgagttgtccaatagtatcctctcgttacaaccagaacccgagattccaccagaactgcctccaccaagaccacacgttcgatgctgttaatttgctactttggagacaaagtggaaatgattc

SEQ ID NO: 222163 - DNA, 600 bp, Canis familiaris
atggcgctgagggagctcaaagtgtgcctgctgggggatacgggcgtaggtaaatcgagcatcgtgtggcggttcgtggaagacagttttgatccaaacatcaacccgacgataggggcatcttttatgaccaagactgtccagtaccaaaatgagctacataaattcctaatctgggatacagctggacaagaacgatttcgtgccttagcgccgatgtactatcgagggtctgctgcagccatcattgtttacgacatcacaaaagaagagacgttttcaacactgaagaactgggtgaaagagctccggcagcacggcccgcccaacatcgtcgttgctattgccgggaataagtgtgatcttatcgatgtcagagaagtcatggagagagatgccaaggactacgccgactccatccatgcgatttttgtggagaccagcgcgaaaaatgcgataaacataaatgaactctttatagaaattagtcgaagaattccgtccgctgacgccaacccgccatctggcggtaagggcttcaagctccggagacagccttccgagccgcagcgaagctgctgctgaccgagcctcagcctc

SEQ ID NO: 222164 - DNA, 1400 bp, Canis familiaris
aggctcgcactccctgaggttcttgaacacggtcgtatcccggcctggccacggggagccccgccactgggcagtcgcctacgtggacgacacgccgttcgaacggttcaacagcgaacgcgagggtcggcggcctgagccgctggtgcggtggctggagcaggaggggcctgagtactgggaagagcgcacgctgaactccaggacctgcacacaggtcctccgaaggacgctgaacgaagtttcgcaggactactccaatcagagcaggaccgggtctcacaccttccagactataacaggctgcgacgtgggacctgatgggcgcttcctgcgcgggtaccagcgtcacgcctatgacggcctggattacatcaccctgagcgaggacctgcgctcctggatcgtggaggacccggtggctcagatcactcggcgcaagtgggatgcggccactgtagctgagaaccgtaagaacttcctggagggcaggtgcttggagtggctccgcagacacctggagaatgggagggagacgctgcagcgcgcagacccccccaaaacatctgtgacccgccgtcccatctctgagcatgaggtcaccctgaagtgctgggctctgggcttctaccctgcggagatcaccttgacctggcagcgtgatggggaggaccagacccaggacacagagcttgtggagaccaggcctggaggagatgggaccttccagaagtgggcagctgtggtggtgccttctggagaggagcagagatacacatgccatattctgcacaagagcctgaccaagcccatcaccttgagatgggaaccacctcctcagtccaccatccccatagtgagcatcattgctggcctggttctccttgtgatcactggagctatgctggttggagttgtgatatggaggaagaagcactcaggcagaaaaggagggagctactcacaggctgaaaataagtatggagggagcagtgctcaggactctcagatgtctgtcatggctcctaatgagcaagccagctgccttgtgggactctgatgagtgatgcaagatttgttcacactcccacttttttgacttcaagagccccggatatctccatctgctaatggtgtctgaaagtgactctgttcctattagcataatgtgagcaggtggggaaattggcccacctctactcatcatgtcccttcccccaactgacctgtgttctttccctaatctgctttcctcttccagcagagatggactggtcattaccatccttgtctttacttcatatttggctgggaagtaatatttaacttgtcttattctgtatgttagtaaattgaacaccaataaaaaaaataaattaaaaaaaaagttaaaaaaaaaa

SEQ ID NO: 222165 - DNA, 587 bp, Canis familiaris; identical to SEQ ID NO: 12058

SEQ ID NO: 222166 - DNA, 600 bp, Canis familiaris
aattcaagctggtcctgctcggggaatctgcagtgggcaaatctagcctcgtccttcgcttcgtcaagggacagttccatgagtaccaggagagcacaattggagcggccttcctcacacagacggtctgtttggacgacacaacagtcaaatttgagatctgggacacagctggacaggagcggtatcacagcctggcccccatgtactatcggggggcccaggctgccatcgtggtctatgacatcaccaacacagatacgtttgcacgggccaagaactgggtgaaggagctacagaggcaggccagccccaacatcgtcattgcactcgcggggaacaaggcagacctggccagcaagagagccgtggaattccaggaagcacaagcctatgcagacgacaacagtttgctgttcatggagacatccgcaaagactgcaatgaacgtgaatgaaattttcatggcaatagctaagaaacttcccaagaatgagccccagaatgcagctggtgccccgagccggaaccgaggggtggacctccaggagaacagcccagccagccggagccagtgctgcagcaactgagccccccttt

SEQ ID NO: 222167 - DNA, 600 bp, Canis familiaris
ggtgaatacagaaccaaccctgaagacatcaaccccagcaaccccactgacgatgatgtgagcagtggatcctccagtgaaaggagcacttcggcaggctacaacatcttccacacccaccttccaactgcatacccgaccgaggaccaagacagttccagggtgtctagcaactcagaccatacccccattaccaaagaccacgactcatcggttcaccccagtgagaggtcccataccactcatggatcagaatcagctggacactcaagtggaagtcaagaaggtggtgcaaacacaacctcgggtcctatgcggaaacctcaaatcccagaatggctcatcatcttggcctcgctcctggccttggctttgattcttgccgtttgcatcgctgtcaatagtcgaagaaggtgtgggcagaagaaaaagctggttatcaacaatggcaatggagcagtgggggacaggaagccaagtgggatcaacggagaggccagcaagtctcaggagatggtgcacttggtaaacaaggaaccctcagagacccccgatcagtatacgacagccgacgagacacggaacctgcagaacgtggat

SEQ ID NO: 222168 - DNA, 1400 bp, Canis familiaris
ctggtgtgtccctctcagggggctctgcggcagggcacggagcagggggaggcccaccccctgcgccccctctccccacagcacaaggcaccagtggtgggggaacaggggcccccggtcttgcagcagccattgccggagccaaactcaggaaagtcagcaagcaagaggaggcctcaggggggcccccagtccctaaagcagagagcactcgaagcacgggcggggggctgatggaagagatgaatgccatgctggcccggagaaggaaagccacacaagttggggagaaaccccccaaggatgaatctgccaatgaggagccagaggccagagtcccagtcccagcccagagtgaaactgtgcggagaccctgggagaagaacagcacaaccttgccaaggatgaagtcctcttcatccgtgaccacttccgaggcccacccctccacgcccagctccagtgacgagtcagacctggagagagtgaaacaggagcttctggaagaggtgaggaaggaactgcagaaagtaaaagaagagatcattgaagcgtttgtccaggagctgaggaagcggggttccccctgaccacagggctccagaagatcctgtatctcctttctgcacaccccgcctgtcaccctgctttccctgcctcaactcgacttggaattggccaaagaccacacaggaatgcatctcccccactccctgtcctacttggaaaataccaagggggtgtggctccgtggccccagggccacacccatactggctgctgattggctggggaggcccccaccctttgcttcctttggtccttccccttcgccatccccttggggctggttcctctgttggggattggggaccaagtgaccccacagtaagggggaaggaaggagggaatctcacattcccttgttctagattcactttaacgcttaatgccttcgaatttttgtttttttaaggaaaaaaaaatatatatatatatttaggttttggggggaagggaaattttgtttctctttcgttttgataaaactggggtgtggggagtttttaaatgctatgcccagggcttgtcccctttggagcagctatttaagggggaggatgtcccaccaggctgggggcacctcccccacccccacccccaccccagggagctcccttccctttggctccttccccttttctatgaggaattaagatgctataactttttggaacctcagttttttggttttttatttgggtaggttttggggtccccctggggaaataagatgagggagaaaggaaagggggaggaaacctcccctctcccaccttcacctttagcttcttgaaaatgggcccctaccgaataaatctgccagttttttataaata

SEQ ID NO: 222169 - DNA, 600 bp, Canis familiaris
gttcttatatatccgtacacaccccccccccaatcgtaagccaagaaaggcaatatattggtgatccagataactgaaatgctccaattaaccccagtttttatctttgttggatagcagtacttttctatgccccacacctctatagtttcctcatatctccaggagactcaccccagcaggccatggccaacatttgatggtctaagtcttttgggggcacatgctaacctttttttaagatttactaaaatgaatctagcctagaaacaccaagtaaatattgtcaaaggatgtgagttgtctaaaaattagattttgcactcaattttagccatatttggaacatcaataatcccatagcaaattttcacagaggactttcagaaattcctgccattgaattttaatttcaaagctttttggtttgtttgctttttcaagtttcatgttatagggaaaatatgattctgattgttcagagttgttaataattgtagttgtgtaaaattatttcattttgtttattttgtgtgtattgtgcacagctttaggggggaagtgcactaattgtgctgttccttatgcggccgcgaattc

SEQ ID NO: 222170 - DNA, 600 bp, Canis familiaris
acggaaggaaattgttatggccatgatgatgaccgcctgtgatctctcagccatcaccaagccctgggaggtgcagagtaaggtagctctactggttgctgccgaattctgggaacaaggtgacctggagcgcacagtgctgcagcagaatcccattcccatgatggacaggaacaaggcagatgaactccccaagcttcaagtcggcttcattgactttgtttgcacctttgtctacaaggaattctcccgtttccacgaggagatcactcccatgctggatgggatcaccaacaaccgcaaggagtggaaggcgctcgccgatgagtacgacaccaagatgaaggccctggaggaggagaagcagaagcagcagacagccaagcaaggggcggcaggagatcagccggggggcaaccccagcccggccgggggcgcacctgcatccaagtcctgctgcatccagtaacgctgcctggcatcagctgcaccgaatggtaccacccttcctggaaagagaccacccaagccagcagaaaaccaaaaacctgcttgtgaagtaaaatagtaatcggatttgaaaaaaaaaaaaaaaaaaaa

SEQ ID NO: 222171 - DNA, 379 bp, Canis familiaris
atgaacctggagccaccgaaggccgagatccggtcggccaccagggtgattggggggcccgtcactcccagaaaagggccccccaaatttaagcagcggcaaaccaggcagttcaagagcaagccccccaagaaaggcgtccaagggtttggggacgacatccctggaatggaaggcctggggacagacatcacggtcatctgcccttgggaggccttcaaccacctggagctgcacgagctggcccagtacggcatcatctagcgccagagcctgacccagaggcttggggccagggtccctgccgcccactccgctccctgctccgggtgcctgcgaggaggccggcccccccccgcggtgtccagacggcccagtg

SEQ ID NO: 222172 - DNA, 185 bp, Canis familiaris; identical to SEQ ID NO: 12065

SEQ ID NO: 222173 - DNA, 600 bp, Canis familiaris
tggcaatgcatttgccactggttcagatgatgccacctgcaggctgttcgaccttcgtgcagaccaggagctcatgacttactcccatgacaatatcatctgtgggatcacctcggtgtctttctccaagagcgggcgcctcctcctcgcagggtacgatgacttcaactgcaatgtgtgggatgcactcaaggccgacagagcaggtgtcttggctgggcatgacaaccgtgtcagctgcctgggggtgactgacgatgggatggccgtggcgacggggtcctgggatagcttcctcaagatctggaactaacgctgacagcaggtagacgtcgtggcgactggaagatcattccaaccttgaagcgttacagtgatagcatttccaatccacccctactaacgtggacgccctgcaccccctcagaacttcaaaagggcaagaccttttccttcacttattgctgaaatcaagagcacaattcccacgaagagaagaacctctgtgctgtaaactcaaacaaattgtgcattcctcccgggaccattgtctttgtttccttttttgtcttggatgaatttaaaaggaaaaactataat

SEQ ID NO: 222174 - DNA, 439 bp, Canis familiaris; identical to SEQ ID NO: 12067

SEQ ID NO: 222175 - DNA, 600 bp, Canis familiaris
gaatgttcaccttcacataaggtttttgctgacattcaaagtgaacaaacttcacaacttaaccaaagtatgtctggattggagaaagtttctgaaacaccaccttgtcagattaattcaaaaacttctgatagatgtgaacttcctagggggaagcttcccaagtcagtctcttacacaaatgcatgtgggatttttagcacagcaagtggaaaatctgtacaagtatcagatgctgcaatacaaaaggcaagagaggtgttttctaagctagaagatagtgccaagcaactctttcctgaagtatcacttaaagataatgaagaacattcagaaaagttcacaaatgaagaaaatactgtgatatatacctcccaaaatttactatcatctgctttctctggatttaggacagcaagtgggaaacaagttccagtttctgaaagtgccttatgcaaagttaagggaatgttagaagaattcaatctgatcagaactgaaagttgtcttcagcattcatctacttctagacaagatgtatcaaaaatgcctcctccctcttgtattggtaagagaaccccagaacactccagaaactcc

SEQ ID NO: 222176 - DNA, 600 bp, Canis familiaris
  misc_feature (415)..(415): n is a, c, g, or t
  misc_feature (454)..(454): n is a, c, g, or t
  misc_feature (517)..(517): n is a, c, g, or t
  misc_feature (555)..(555): n is a, c, g, or t
  misc_feature (587)..(587): n is a, c, g, or t
aggattcaaaagacacaatgcctagaaaatggagcaaaaccacgtaaactgatttgtaactaagacaatataatttaattgatgttagaaattatgctcccatctccgttctgaccattctctcgtattgttaaaatgcaatcaagcctggaaatatttataccagtggagcccttgagttgagtgcgacgttcataaacagcagaagcattttgcaatttccgatctgttgaaatgtacacattccaatctggcctgcttttttaaagcctaacttcatgtgaataatcaaatagaaaaatctaaacttgtataatatgtaatgaccaactgcctttccctggcccagataaataatttcaaaggcgcccgtgttaggtccataaacggggaaagtctatggtttgggagaaanggatttgtttatccgccaataaggtccatccgggggcangctcctaaggcttgctttattgccttcctcccagcggaatgggctttgggtggaactccaaanggctttgctcccccggccttggccggcccttccctccnttccccctccaagaaacgaaatggggggaaanccccaaaaacctc

SEQ ID NO: 222177 - DNA, 364 bp, Canis familiaris; identical to SEQ ID NO: 12070

SEQ ID NO: 222178 - DNA, 600 bp, Canis familiaris
atttcactgatttgagagtgagaacaagcacaagaggcagggaggggcagtgggagaaggagaagtagacttcccacggagcagggaaccaacacagggaaccaacacagggctctatcccagaaccccgagatcatgacctgagccaaaggcagctgcttaaccaactgagccacccagatactccaatagcaatacttgttaaaatgctaatcaaatactggggaaaataccaacagacttttttaggtgggctttttttttttaatttttatttatttatgatagagctcgtgccgaattcctgcagcccgggggatccactagttctagagcggccgccaccgcggtggagctccagcttttgttccctttagtgagggttatttcgagcttgcttaatcatggtcatagcgtttcctgtgtgaattgttatcgctcacattcacacacatacgagcggagcataagtgtaagctgggtgctatgatgggcactcccttattgcgtgsgtcctgccgtttcgtcgaactgtgtgcgctgctatgatcgcacgccggggagggttcgatgggcgctccgtctcgtctatcgtggcgt

SEQ ID NO: 222179 - DNA, 600 bp, Canis familiaris; identical to SEQ ID NO: 12072
  misc_feature (236)..(236): n is a, c, g, or t
  misc_feature (368)..(368): n is a, c, g, or t

SEQ ID NO: 222180 - DNA, 550 bp, Canis familiaris; identical to SEQ ID NO: 12073

SEQ ID NO: 222181 - DNA, 600 bp, Canis familiaris
attcttttctcttatctaacacgtatagacaggacggtgtattagttagagtatagtacgactattagttattgcagatcggaaaacgtgttattttttttcaatagtagaaaactcagtatattcttactaggaaaatcacgtattagatgtaagagtacgacgaaggggtcctattgttcttttcgttcctcctgttgttattgttgtccgtaaagtgtcgatgccgtctctgtcagttttctcatactgcgcgtcggtctcgtcgtctattcacctgtctcgtcggtgccgctcctcgtcacgtgtcaggctcatctcgtgttcttttcgttcgtagtgtgtcttgcgtgcttgtctagccgttgcttccggttgttctctcctctctgcgcggcttgcgcggcgtgtcgtcttgcgggcgccgtcgcggtggtgctcctgtttctgggtgtttggtcgggttctgctggcgtctgtcggtgtttgttgtccctccccctcgggggctcgtgtgtggcgttccgggtttctcgtggggtgccgtccgcggtctttggcgggttttttgggcggggggtgtttcggtggttccccccc

SEQ ID NO: 222182 - DNA, 600 bp, Canis familiaris
  misc_feature (240)..(240): n is a, c, g, or t
ttctcattttgaaagggaaaaaattcctctaggatatagctactactaaccctcctggtgcgggtatatggacactttcttcgagaaggaaatgagcctcgattgaatacctgatttgggccccattttttttgtcaaataaatggtctcaatgatcctccgaaggctttggtttaggggggtcagttcctgtgtccgtaatgggagcggcgggatatagtcttttttgttctgttcttnctcttggttttctcccctgtgttttgtcggtcgggttccggttgccccggttcttgcttctccttgggggtctccctggccctctctgtgcttcctgtttctgctgtgctgctcccctttgtggtgtgcttttgtgattatgtggctgctcttcgggtggggctctcgtgcggtctggccggggtcctgtttggggcgcccgtgggtcccctttgtcttggtgggttttcggctgggtctggctgggtctgggggtgttcgccctccccccttgcggggttggtgcctggcgtggtggccctttggtgggcccgttcttggcttggcgggtttttgccgggggggtggttgctcccgccc

SEQ ID NO: 222183 - DNA, 600 bp, Canis familiaris
ccctccccttcctttgcctcctgttggggagaggggggaagggggactttctgggcaggggtaaatgttgggggaggggaagaaccatctcccgtcccccccccacccaacaaacatggaagaaagaaccgagaagggcggaagggaagaagtgccagcagggggagacacaccgatccatctccacagtctcgcccaggtgggttggagcccggccccagcagctaagtccagctggcccgcctccgtcgccccccactcccggcagcctgttaaagcttgagctcgttggctattttggaggcaatgtttttgaaggccatggaggtgcccgatatccgcttaatcggacacgttgagagacagcgcggcagtttgccacctccatctccactgcacgaagtctcgtggccaggcgtgcgtgatgccagcgcatgtacttctctcgtgcgatttctgcgcccggggatcactattttgagggccgcccggtggagctcagctttgtcctttgtgaggtatttgggtgcgtatatgtctagcgttctggtgaatgtttcgtcaatcccaacatgggcgagctgatttagctggtgctgt

SEQ ID NO: 222184 - DNA, 600 bp, Canis familiaris
gctgctgaggaaacacctagagagaaatccctttgggtggggagggttgcggggagactggtcactggtggactgggagtgttttagggggcactcctggccaacccggaaaccactcagagaccaaacgctagacatctgttcgttcagcctcagaagagaggggcttgaagccagtagggacctacaggaacgtgataaagcctccgagaccctgctggtcgcacagcgcagaccccgtggtgattcatggttagggagtcgactggaatcactaaggaaactccagctcttccggaatccggatctccctgctcctaagaccccacggaacaccacttcgattgcgggattttattgcgacaaaatcttatcatcacggcacattcattggttaactccgtcaccaaagctgaccttcttccgagaacaataactaaaataacccatcttaactcgtctaataatctttatctttcactcaccacacttcgcttggcttcaacaacatctcttcttaatcccagcaaaagcgtcccccccggggacaccgcgccaccccttgttccaacttcccgactccttcctccaattaaaccc

SEQ ID NO: 222185 - DNA, 281 bp, Canis familiaris; identical to SEQ ID NO: 12078

SEQ ID NO: 222186 - DNA, 380 bp, Canis familiaris; identical to SEQ ID NO: 12079

SEQ ID NO: 222187 - DNA, 600 bp, Canis familiaris; identical to SEQ ID NO: 12080
  misc_feature (575)..(575): n is a, c, g, or t

SEQ ID NO: 222188 - DNA, 280 bp, Canis familiaris; identical to SEQ ID NO: 12081

SEQ ID NO: 222189 - DNA, 315 bp, Canis familiaris; identical to SEQ ID NO: 12082

SEQ ID NO: 222190 - DNA, 513 bp, Canis familiaris; identical to SEQ ID NO: 12083

SEQ ID NO: 222191 - DNA, 419 bp, Canis familiaris; identical to SEQ ID NO: 12084

SEQ ID NO: 222192 - DNA, 600 bp, Canis familiaris; identical to SEQ ID NO: 12085

SEQ ID NO: 222193 - DNA, 500 bp, Canis familiaris; identical to SEQ ID NO: 12086

SEQ ID NO: 222194 - DNA, 405 bp, Canis familiaris; identical to SEQ ID NO: 12087

SEQ ID NO: 222195 - DNA, 450 bp, Canis familiaris; identical to SEQ ID NO: 12088

SEQ ID NO: 222196 - DNA, 600 bp, Canis familiaris
ggcaactacacttctcaccccataaagccattcagcgattgggaaactgtctgtctgcaaagccaacataagtcagcaaggcattttctgaattgcacaacacatccccacagaggccagaacagagctacagcctcacatgctggctcaggccctccttgtgcttcccattccaatggcgtaatgcagtgcacatgttcccatctgagcccagcagggagaagggcagacatgcaggggggagagaactagtatcattaagtagaattgacttttggctctgggggaagttccaagagaggtaccctctgtcccctcagaccctcatttccgggggtcgtctctcttccatggtccccttggccctctagctgacatctcttctctcataaataccctttcacttgcaaaaaaggttttccagggtggccaaatggatgcctcgaaggtacagaggtggtgcagtcaatgtttgttgcttcactagaggtggttggagtgtgtgtgggtgtgttaaggcccatgtgagcgggggggggtgttccttgggttgttggttttccatcttccggtttttttttttttccccccccttttgat

SEQ ID NO: 222197 - DNA, 600 bp, Canis familiaris
accatttatctctgtttcattatagtttctggtgatataccttattcttttgtttagaacatattccccttgtttctccgttttccttgactctctgtgttgtacattagataaaaacaattatttctcctagtcttgacagattggtctcctataggaaatggactttgtcaatcagcctatcctgagctcctatttgcctcttaaacttttgtgattgttcaagctaccatctgtttcttagtggcccccagtagttgaatgtgtaccaaagactcaggggkacccaaaagcgaggatcacaggcagcactcagatgctgggcggaccagaagccagaaactcaggcaaacagctgggggaacwacgcagtcaaaccctgcccccggagggaacctggaggaaaggacatttttgcctcccccccctgcataaagccaccggggggggccaacaccccatttaaaagcggctgggtggccaaggccccgggggacccctaattgcagggggcattggggaacaaaaactggggttaagggcccctcccccagggggagggataaaaattggggcccacaagttggcaggccccccccc

SEQ ID NO: 222198 - DNA, 499 bp, Canis familiaris; identical to SEQ ID NO: 12091

SEQ ID NO: 222199 - DNA, 300 bp, Canis familiaris; identical to SEQ ID NO: 12092
  misc_feature (237)..(237): n is a, c, g, or t

SEQ ID NO: 222200 - DNA, 500 bp, Canis familiaris; identical to SEQ ID NO: 12093

SEQ ID NO: 222201 - DNA, 520 bp, Canis familiaris; identical to SEQ ID NO: 12094

SEQ ID NO: 222202 - DNA, 470 bp, Canis familiaris; identical to SEQ ID NO: 12095

SEQ ID NO: 222203 - DNA, 600 bp, Canis familiaris
ggatggaaggaaagaagggtgccctgaagacctgcaggggaggggaaggagtggctgtccacctggcaccctcctccaacagtgacacccctgccactctgcacgctcccaggcagggcgaggggaaccaatcccagaactgcccctttccatggaagcaagaagggcagccgagggcagcctgtgggactcaggctagacagcaggaaaacttcccaacagaaggctgcaggaaagcccatggaggactctcttccagagctggcctgcacagccttcagcatggggcccggcacacaattggtgccctcacaggatgcattttttcccagaagaggatccccttaggtttggctgtgttctttcccttgaagagttagggcccagcaatgggcagcaacacatgccttcagtggcattaaaaccccttaatttgcccctcccaccaaaaaaaaaaaactcctgggggggccggttccccaattcgccctttatgaattgttttaaattcgtggcggtgttttcaaagtcgtgctgggaaccctgcgtttcccacttatcccttgcggaatcccctttgcaagtggtgatacgaaaggc

SEQ ID NO: 222204 - DNA, 600 bp, Canis familiaris; identical to SEQ ID NO: 12097

SEQ ID NO: 222205 - DNA, 500 bp, Canis familiaris; identical to SEQ ID NO: 12098

SEQ ID NO: 222206 - DNA, 600 bp, Canis familiaris
ggccccgcgatgggagctgctccctgggggctgagctcgtcagcatccttgacctgccgtcactcctgaagtcggagaagagccccttgcccacccacatagccccttgctccgttttggggtcgcctccgtccatccggtcctctgccctagcggctgcccagtctaacaaagaaacaaaggaacagggcaggaagatgatactggcgtccgtgttggggagcggtccccggagcggacctccactccggcccttgctggggcctgcactctctctccgggccgctccacgtcagccaccgacacgcaccacgtgagatggcggggagtcccaagactgtacctccttttaaaacagtcggcatcgatgtggcagggagaagccctcagtcgcctcattccgacatgatgctctatttaggcgctttaggatggagcaccttttaaaagtgccggtatttgagaaaaagtttcagtaggatgctaccaaataaagggtttcgagcgttcgtttaatattgggtgaacaagcaatatttatgttaagagtttttatcggtgctttaaaaagtgaaaaattttttttttatgaaaaggaaa

SEQ ID NO: 222207 - DNA, 600 bp, Canis familiaris
ccccgcactagctactaccagtatggcctgggcatcctggccctgtgtgtccaccagaagcggctccatgacaccgtggtgggcaagctcctgtatgctgtggaacatgaccatcatctccaccgggaccacctctctgtgggtattgctgaatacacccccaagaacggagaaaccatcgagctgaggctggttagctggtagcccctgggctcacctgcccacagcctggcctactccctgggcttctgccttccctccagacatcgctgtaacaggcacacacccaaccctgctgctacctcatgtgtacttggagcagtgtcccctggattacccacctatcaccttcacagatgtcctcagccatcatccaccctggatcagggaaccaagcaccttcccttggaagggtgccttctcaagtctggctcacctggccacacaggatcccctaaggatatagttgagggttaaagmaaatctccacaaagagaagtacggctatagtgttttagtcgcccatatggattgggtcttcgaggagctttttggccaagggctgttcctttacccagtttttttttggctttaggaagt

SEQ ID NO: 222208 - DNA, 350 bp, Canis familiaris; identical to SEQ ID NO: 12101

SEQ ID NO: 222209 - DNA, 450 bp, Canis familiaris; identical to SEQ ID NO: 12102

SEQ ID NO: 222210 - DNA, 350 bp, Canis familiaris; identical to SEQ ID NO: 12103

SEQ ID NO: 222211 - DNA, 350 bp, Canis familiaris; identical to SEQ ID NO: 12104

SEQ ID NO: 222212 - DNA, 250 bp, Canis familiaris; identical to SEQ ID NO: 12105

SEQ ID NO: 222213 - DNA, 600 bp, Canis familiaris; identical to SEQ ID NO: 12106

SEQ ID NO: 222214 - DNA, 580 bp, Canis familiaris; identical to SEQ ID NO: 12107

SEQ ID NO: 222215 - DNA, 380 bp, Canis familiaris; identical to SEQ ID NO: 12108

SEQ ID NO: 222216 - DNA, 300 bp, Canis familiaris; identical to SEQ ID NO: 12109

SEQ ID NO: 222217 - DNA, 200 bp, Canis familiaris; identical to SEQ ID NO: 12110
  misc_feature (141)..(141): n is a, c, g, or t

SEQ ID NO: 222218 - DNA, 430 bp, Canis familiaris; identical to SEQ ID NO: 12111

SEQ ID NO: 222219 - DNA, 260 bp, Canis familiaris; identical to SEQ ID NO: 12112

SEQ ID NO: 222220 - DNA, 350 bp, Canis familiaris; identical to SEQ ID NO: 12113

SEQ ID NO: 222221 - DNA, 536 bp, Canis familiaris; identical to SEQ ID NO: 12114

SEQ ID NO: 222222 - DNA, 562 bp, Canis familiaris; identical to SEQ ID NO: 12115

SEQ ID NO: 222223 - DNA, 511 bp, Canis familiaris; identical to SEQ ID NO: 12116

SEQ ID NO: 222224 - DNA, 600 bp, Canis familiaris
atgcagtttttctttgcttcatttgtaccaacatatacaggaagttcatcaggagaatccctgaaatatcccatgtggaattgagttttattatctccaataataatggtctggaactccggagatcatagtaaaatctccagtgaaggttaaaattcaggcttgctgattttttcattttatgttttccggcaaggatatcataaggcccactaactgaagtcaaggcttgtggaaagtgaatctttgccagtataacaggtgatagtcccatattattatagcattattttatatttcccttagaccagatctttgtaaaggttccttttctgtggaactgcttagatctccggtccggtttcctacccgtccttttccactggtaggaacccggggaatgattcgtgggggaaccccccccctgggttttccaggtcaggcccctcccaggacttcccggagtggttggaatgctccggcgggaaggctgttatggttttctacttcgtttcgaggggcccgggggctcggtttccccgggttacccccttccttcagcggtttttcccctgcgggcccccccgccgggttgggttt

SEQ ID NO: 222225 - DNA, 567 bp, Canis familiaris; identical to SEQ ID NO: 12118

SEQ ID NO: 222226 - DNA, 473 bp, Canis familiaris; identical to SEQ ID NO: 12119

SEQ ID NO: 222227 - DNA, 600 bp, Canis familiaris
gcacaaccattaaacttattaagaagtccatatgtaaaatttctagaaataactggcatctaccctttttagaaactagtttcaaaaaacaacttcctagaaattattttcacatgtttgagaggtataagctatttgttagacataaatggagaaaagtcagtccatattcttctgttggtttgcaaccttagagttttctgagtgaaattcacaactggtctccaagcatgaatagcagggagagaggaagaaaggcagattaccccagatcagtagggggcaggtttaaaaagcaaggaatttacatagggaggggggtcttgggggggccaaactaccaggtctccacacccatctgcccaaaatggtaaaaggtttttacccaaagccgtaaccggggaccatcatgtacccaatcccggaaaccctccccaacaccagtattttttcccagggcgcccgcccttacagatgcrctccccaatgtgcccatagatggggggggccccccttcccaagcccccagggccgggttcagggggccccccactggccccgggccccgcccccgaggccacctcctgggccgtacccctc

SEQ ID NO: 222228 - DNA, 600 bp, Canis familiaris
ttaacttgataccgttaaaattaaaatctgtatagaagattgattacattttcttaaatttttttccttaagtggttggttttccaaggttttctccctggcttcatagatgatatgcttgataagagccagagtaggtgaagtcttcattcagtcttgtctttatcacttccaggtgttcactaatctaagttaaaattttgaaggaagtagcacttacatgcttcttgacttctttagcatgcattgtgtactgaaaaaactgatgccacattgaagttgttaataacatatactgtgtttggcaaacagccggataaacctgatcatgtgggaattttttcgaggagtccgccaaagtggattcatagtctctcggtgcagtgtgtattcctttaaggaaagcccagtgtttattggagagaaaaccttgtatctaaggttagttgaattttgaagtggggcgcattctagtatagtgccgcgctagtgaagggtttttaggttactctggccaatccctttgggcctataaaaaacctgggcgatgctcagccccgcggctcttaggcccttgggggatcttgaaccggttttttt

SEQ ID NO: 222229 - DNA, 501 bp, Canis familiaris; identical to SEQ ID NO: 12122

SEQ ID NO: 222230 - DNA, 594 bp, Canis familiaris; identical to SEQ ID NO: 12123

SEQ ID NO: 222231 - DNA, 600 bp, Canis familiaris
gaccctgaccggcaagaccatcaccctggaggtggagcccagtgacaccatcgaaaatgtgaaggccaagatccaggataaagagggcatcccgcctgaccagcagaggctcatctttgcaggcaagcagctggaagatggccgcactctttctgattacaacatccagaaagagtcaactctccacctggtcctgcgcctgaggggtggtatgcagatcttcgtgaagaccctgaccggcaagaccatcaccctggaggtggagcccagtgataccattgaaaatgtgaaggccaagatccaggataaagaaggcatcccgcctgaccagcagaggctcatctttgcaggcaagcagctggaagatggccgcactctttctgattacaacatccagaaagagtgaaatcttcacctggttctccgtctgaagggtggctgttaattcttcatcttgaattcttaagtgccaatgatggcattgtctgaactctagcattttcccaawtttaagtttgaawtaccaattcagtaaaactgaatcactggtttgtcatagctgtcaaatgttataaaattttttgcatgttaaaaaaaaaa

SEQ ID NO: 222232 - DNA, 600 bp, Canis familiaris
  misc_feature (458)..(458): n is a, c, g, or t
ttagttctgaagacagaggggatcacctgagccaaccaggtggacatggccaacaggggccacactcaacccagggccctggcctgggccctgggactgaccctggtatggatcctgctgggtgcctgtggagggagccgcccactcccagctttgtcccgaagacaccataggctggcggcagatcttggcacaggccagctgcaccttgcagagatggacacaccagaggcatcgggccctgggatggtctcagaacactgtgggaagccgagccccgggtgcgaatcctttctkggacacctccaagtcgccctccacaatcgctttcgcctgttgttactwgggatacgccaggcgcascctctgttcagagctcttcrgcattctggtttccacctgttaaagtgatattacctgcggtccgactttgctcccactcctagaaaaaagggctnttaactcgctgcactactacgagcagaccttccctacgggcggaccttttccctcgtttttggctaagctaccaatggcgctcctttgccgatactgctcacaattcatctcgtaattcggggtcaacaagacgaaggccag

SEQ ID NO: 222233 - DNA, 555 bp, Canis familiaris; identical to SEQ ID NO: 12126

SEQ ID NO: 222234 - DNA, 441 bp, Canis familiaris; identical to SEQ ID NO: 12127

SEQ ID NO: 222235 - DNA, 600 bp, Canis familiaris
ccctcttggaggaaagaggtcattctgtaggtttctgctctgccctccccactgggctggaccttgttggagggtcaagggaccctgccatcgctctgsaaagaggctctgggtcagaactggctcagtcctgggagtttggagagagggatgtggttctgtagtgatgcctccgtcaaccagccaaggggacagatttgctgatagagggtgatgtcagggacggcccacgtattcctgtccaaggggctccgtggttaactggctaccaccaaacgtctctgtaggtctgaccttcccgcgtagttacaggagccacgtgcacccctgtttttcagtccattctaggacctgacaccaggtccaacctttccagtgaagttgagtaatttaatttagatggtggcagttccctctgtcacctcctaagggcacagtcacgatgcacctgccagaatgcccgggtccctaccggtgtgcttttcaatactactcctgtaaaattttttggcataattaaaccactcattacaaacaacaaactagggacctgggtaatccctggggcatttttcctttcccagggcttacccaattcct

SEQ ID NO: 222236 - DNA, 600 bp, Canis familiaris
cctaccggtaatggaatgaactcaaacaggttaacacgacaagtaaaacttgagtcaacagcagggtggtaggaatacgacgttgacgtggtcggagacttagacggtcgggttggtcttcggtccgggtctccatttaccaggtcggttcggaaagcggagaactcgataactcaattggttagaataaatgtgttgatatttatgtggtaaaaaaaaaataaaaaagtgcacccccccggcctaggaattgcggtatactcactgctattagaattgagtccggctgctttagaagctgctcagtcccaaaggtccgcttaggaagttatgcgttcacaaatgggtttgcgacgtcctaatacgcacacggcagcatgcggttgaaactgcgcgtcatcgcatcgaatctacgctattttctaatgccctaatttctaatcgtgttttagatacgcatccgaatgtttatkaacatcggccatcctccctctgcttcaacctggtttacacgcgtgactaccccaagctttccccccggtccagctgggatgcttttcctcctgtacgtatccggtaccccgcctttctttccacgcc

SEQ ID NO: 222237 - DNA, 600 bp, Canis familiaris
cccagacattcggccgtgtttgccgtgctctgtggacatcgctttgtatgtgggcgtgcgtgaacctcctcagcaggggcacactccaggtcagatgctgcaggcaccgtgtgtgtttattaacattgctgctgccgtagagagggagaaaatgtcctcagcatgaacgagagccaccgtgtcctcctcctgtcccctggtgtccagcgtgctcaggtgctccccgggggagcaggggagcccgggccgcccacccgcacggaccaccccggggtgaccgctctcttggaggctgtcctgctggttgcacttttcaggcttctccatttcacgtatatgctttggaaggggaatcggacgacgtgacacttgcaggcaaagacagatagctgtgacaatctaagtgacctctgctcaacggtctaaaccatcagacaaaggtttcaagtagcattctttatcaaatatttttgcacacaattctttttgaaaaatcaaacacattctcttttaaaaaaaattttttaacaaacttttcagcctcattttttttttaataataactaaaaaaaaaaaaaacttcgggggggtcaattccct

SEQ ID NO: 222238 - DNA, 600 bp, Canis familiaris
agaagccaggtagacaaccatcacctctagacagacagcagcaaaaccttacaatgtcattggagtccctctgatagttggatggctgctgctgttttccctgagggaacagaaacttcagcttcagtagcccaaagttgatgatatgcttaaagctcccctagggactcacctttgagtcttaccctgccactgttatcagactcagaacaggatcttcttgagttctgcttcctcccacccagcttcctggtgatagaattttgcatggctgttcgacctccctgccacctgctcaccctgttgattttttggctgactggcgagaaaaagggaaactgaactgtggagtcttgctgctttgccaatgatggggttacatttctcaaatgctcatttaaaggtctaagagtgggaattttgctatagaaacaagtggtgagaaggggcatttggggtataatactgtcagtaagttcagtaactccattttacatttttggggagcgccctgaggatactactaccataaactggtgatcctcgtacggggataatttgtttgatttccaccaaatttttaaaaaaaaattttgggca

SEQ ID NO: 222239 - DNA, 600 bp, Canis familiaris
aaatgcgttcatacacacaacgcggtattatccaaccttaaaaacgcacgaaattacggcgcacgtcacatcaggatgcacattcacgacgtgtaagtgagacaggccggacacaaaagggcagacattgtcggacttcgcttgtctggggcatctagagcccccaaactcctcaacgggaagtcgtgagccacaggaggggagcagaatcgtgggggttactcttttcattgcatcagagtcccagtgagggaagatgaactcccgagatggaccgtggttatcacttcccaaccgctccgaaataaccctacttaacttcacaccttaaagccgggtaaaacggtcaattttataatatgtatataaatatatatatttatggattatcgatattttccccactaaaaaatacatagaattcgccaataaataatgctgaatagaaatttcaaatacttttttaaaaccccttttttttcacccatcgtttcttttttaccattcccttccccgtctatttggaatcttcttctttgctggttttttggaatcattttttttccccccccctttctttaagcaaacctttttttcttt

SEQ ID NO: 222240 - DNA, 250 bp, Canis familiaris; identical to SEQ ID NO: 12133

SEQ ID NO: 222241 - DNA, 353 bp, Canis familiaris; identical to SEQ ID NO: 12134

SEQ ID NO: 222242 - DNA, 415 bp, Canis familiaris; identical to SEQ ID NO: 12135

SEQ ID NO: 222243 - DNA, 364 bp, Canis familiaris; identical to SEQ ID NO: 12136

SEQ ID NO: 222244 - DNA, 376 bp, Canis familiaris; identical to SEQ ID NO: 12137

SEQ ID NO: 222245 - DNA, 336 bp, Canis familiaris; identical to SEQ ID NO: 12138

SEQ ID NO: 222246 - DNA, 341 bp, Canis familiaris; identical to SEQ ID NO: 12139

SEQ ID NO: 222247 - DNA, 132 bp, Canis familiaris; identical to SEQ ID NO: 12140

SEQ ID NO: 222248 - DNA, 349 bp, Canis familiaris; identical to SEQ ID NO: 12141

SEQ ID NO: 222249 - DNA, 508 bp, Canis familiaris; identical to SEQ ID NO: 12142

SEQ ID NO: 222250 - DNA, 339 bp, Canis familiaris; identical to SEQ ID NO: 12143

SEQ ID NO: 222251 - DNA, 385 bp, Canis familiaris; identical to SEQ ID NO: 12144

SEQ ID NO: 222252 - DNA, 461 bp, Canis familiaris; identical to SEQ ID NO: 12145

SEQ ID NO: 222253 - DNA, 397 bp, Canis familiaris; identical to SEQ ID NO: 12146

SEQ ID NO: 222254 - DNA, 405 bp, Canis familiaris; identical to SEQ ID NO: 12147

SEQ ID NO: 222255 - DNA, 313 bp, Canis familiaris; identical to SEQ ID NO: 12148

SEQ ID NO: 222256 - DNA, 321 bp, Canis familiaris; identical to SEQ ID NO: 12149

SEQ ID NO: 222257 - DNA, 355 bp, Canis familiaris; identical to SEQ ID NO: 12150

SEQ ID NO: 222258 - DNA, 178 bp, Canis familiaris; identical to SEQ ID NO: 12151

SEQ ID NO: 222259 - DNA, 360 bp, Canis familiaris; identical to SEQ ID NO: 12152

SEQ ID NO: 222260 - DNA, 483 bp, Canis familiaris; identical to SEQ ID NO: 12153

SEQ ID NO: 222261 - DNA, 448 bp, Canis familiaris; identical to SEQ ID NO: 12154

SEQ ID NO: 222262 - DNA, 465 bp, Canis familiaris; identical to SEQ ID NO: 12155

SEQ ID NO: 222263 - DNA, 320 bp, Canis familiaris; identical to SEQ ID NO: 12156

SEQ ID NO: 222264 - DNA, 306 bp, Canis familiaris; identical to SEQ ID NO: 12157

SEQ ID NO: 222265 - DNA, 224 bp, Canis familiaris; identical to SEQ ID NO: 12158

SEQ ID NO: 222266 - DNA, 483 bp, Canis familiaris; identical to SEQ ID NO: 12159

SEQ ID NO: 222267 - DNA, 487 bp, Canis familiaris; identical to SEQ ID NO: 12160

SEQ ID NO: 222268 - DNA, 473 bp, Canis familiaris; identical to SEQ ID NO: 12161

SEQ ID NO: 222269 - DNA, 229 bp, Canis familiaris; identical to SEQ ID NO: 12162

SEQ ID NO: 222270 - DNA, 600 bp, Canis familiaris
  misc_feature (580)..(580): n is a, c, g, or t
tactaatgcagccaccacgaatggccgcacagacaccatgcaactccagagggctcccttcacctagcccatgctgtgactggcagccagcaattgtgcaacaaggcaggtagcttctggaatacataagccaaccactcttttttttttttttttttaagattttatttatttattcatgagagacagagagagaggcagagacacaggcagaaggagaagcaggctccatgcagggagcccgacgcgggactcgatccggggactccaggatcacgccctgggctgaaggcagcgctaaacccccgagccacctgggctgcccagcaaccactcttaaaatcaatttcawttatycacttgtgggttatccagtgtcttttttgatcaaaaacagttttcccgcttccattttgtttttaacacactcctttgctggtgctggggttcagggatggaaactatttgagggaagcttttaaaaaaataactcgatgctccaacctkggggatgttttgagaaatttggggattttcctcccyagggggaagatcccaaattccattaactgctttttanaaaaattggtttccacgaat

SEQ ID NO: 222271 - DNA, 441 bp, Canis familiaris; identical to SEQ ID NO: 12164

SEQ ID NO: 222272 - DNA, 400 bp, Canis familiaris; identical to SEQ ID NO: 12165

SEQ ID NO: 222273 - DNA, 456 bp, Canis familiaris; identical to SEQ ID NO: 12166
  misc_feature (331)..(331): n is a, c, g, or t

SEQ ID NO: 222274 - DNA, 300 bp, Canis familiaris; identical to SEQ ID NO: 12167
